(19) United States
(12) Patent Application Publication
(10) Pub. No.: US 2004/0265833 A1
(43) Pub. Date: Dec. 30, 2004

(54) Methods and nucleic acids for the analysis of colorectal cell proliferative disorders

(76) Inventors: Cathy Lofton-Day, Brier, WA (US); Andrew Sledziewski, Shoreline, WA (US); Jeff Thomas, Bellevue, WA (US); Robert W. Day, Seattle, WA (US); Lori Tonnes-Priddy, Everett, WA (US); Karen Cardon, Renton, WA (US)

Correspondence Address: DAVIS WRIGHT TREMAINE, LLP, 2600 CENTURY SQUARE, 1501 FOURTH AVENUE, SEATTLE, WA, 98101-1688, US

(21) Appl. No.: 10/602,494

(22) Filed: Jun. 23, 2003

(51) Int. Cl. C12Q 1/68

(52) U.S. Cl. 435/6

(57) ABSTRACT

The present invention provides, inter alia, novel diagnostic and prognostic methods for detecting, or for detecting and differentiating between or among colorectal cell proliferative disorders. Preferably, said colorectal cell proliferative disorders are selected from the group consisting of colorectal carcinoma, colon adenomas, and colon polyps. The inventive methods are based on analysis of differential CpG dinucleotide methylation of genomic DNA between or among normal and disease states. Additional embodiments provide nucleic acids and oligomers (including oligonucleotides and peptide nucleic acid (PNA)-oligomers), nucleic acid arrays and kits useful for practicing said methods, and in otherwise detecting, or detecting and differentiating between or among colorectal cell proliferative disorders.

### FIELD OF THE INVENTION

[0001] The present invention relates to genomic DNA sequences that exhibit altered CpG methylation patterns in disease states relative to normal. Particular embodiments provide methods, nucleic acids, nucleic acid arrays and kits useful for detecting, or for detecting and differentiating between or among colorectal cell proliferative disorders.

### SEQUENCE LISTING

[0002] A Sequence Listing, pursuant to 37 C.F.R. § 1.52(e)(5), has been provided on compact disc (1 of 1) as a 1.436 MB file, entitled 47675-45.txt, and which is incorporated by reference herein in its entirety.

### BACKGROUND

[0003] The etiology of pathogenic states is known to involve modified methylation patterns of individual genes or of the genome. 5-methylcytosine, in the context of CpG dinucleotide sequences, is the most frequent covalently modified base in the DNA of eukaryotic cells, and plays a role in the regulation of transcription, genetic imprinting, and tumorigenesis. The identification and quantification of 5-methylcytosine sites in a specific specimen, or between or among a plurality of specimens, is thus of considerable interest, not only in research, but particularly for the molecular diagnoses of various diseases.

[0004] Correlation of Aberrant DNA Methylation with Cancer.

[0005] Aberrant DNA methylation within CpG ‘islands’ is characterized by hyper- or hypomethylation of CpG dinucleotide sequences leading to abrogation or overexpression of a broad spectrum of genes, and is among the earliest and most common alterations found in, and correlated with human malignancies. Additionally, abnormal methylation has been shown to occur in CpG-rich regulatory elements in intronic and coding parts of genes for certain tumors. In colon cancer, for example, aberrant DNA methylation constitutes one of the most prominent alterations and inactivates many tumor suppressor genes such as p14ARF, p16INK4a, THBS1, MINT2, and MINT31 and DNA mismatch repair genes such as hMLH1.

[0006] In contrast to the specific hypermethylation of tumor suppressor genes, an overall hypomethylation of DNA can be observed in tumor cells. This decrease in global methylation can be detected early, far before the development of frank tumor formation. A correlation between hypomethylation and increased gene expression has been determined for many oncogenes.

[0007] Colorectal Cancer.

[0008] Colorectal cancer is the fourth leading cause of cancer mortality in men and women, although ranking third in frequency in men and second in women. The 5-year survival rate is 61% over all stages with early detection being a prerequisite for curative therapy of the disease. Up to 95% of all colorectal cancers are adenocarcinomas of varying differentiation grades .

[0009] Sporadic colon cancer develops in a multistep process starting with the pathologic transformation of normal colonic epithelium to an adenoma which consecutively progresses to invasive cancer. The progression rate of benign colonic adenomas depends strongly on their histologic appearance: whereas tubular-type adenomas tend to progress to malignant tumors very rarely, villous adenomas, particularly if larger than 2 cm in diameter, have a significant malignant potential.

[0010] During progression from benign proliferative lesions to malignant neoplasms several genetic and epigenetic alterations occur. Somatic mutation of the APC gene seems to be one of the earliest events in 75 to 80% of colorectal adenomas and carcinomas. Activation of K-RAS is thought to be a critical step in the progression towards a malignant phenotype. Consecutively, mutations in other oncogenes as well as alterations leading to inactivation of tumor suppressor genes accumulate.

[0011] In the molecular evolution of colorectal cancer, DNA methylation errors have been suggested to play two distinct roles. In normal colonic mucosa cells, methylation errors accumulate as a function of age or as time-dependent events predisposing these cells to neoplastic transformation. For example, hypermethylation of several loci could be shown to be already present in adenomas, particularly in the tubulovillous and villous subtype. At later stages, increased DNA methylation of CpG islands plays an important role in a subset of tumors affected by the so called CpG island methylator phenotype (CIMP). Most CIMP+ tumors, which constitute about 15% of all sporadic colorectal cancers, are characterized by microsatellite instability (MIN) due to hypermethylation of the hMLH1 promoter and other DNA mismatch repair genes. By contrast, CIMP− colon cancers evolve along a more classic genetic instability pathway (CIN), with a high rate of p53 mutations and chromosomal changes.

[0012] However, the molecular subtypes do not only show varying frequencies regarding molecular alterations. According to the presence of either micro satellite instability or chromosomal aberrations, colon cancer can be subclassified into two classes, which also exhibit significant clinical differences. Almost all MIN tumors originate in the proximal colon (ascending and transversum), whereas 70% of CIN tumors are located in the distal colon and rectum. This has been attributed to the varying prevalence of different carcinogens in different sections of the colon. Methylating carcinogens, which constitute the prevailing carcinogen in the proximal colon have been suggested to play a role in the pathogenesis of MIN cancers, whereas CIN tumors are thought to be more frequently caused by adduct-forming carcinogens, which occur more frequently in distal parts of the colon and rectum. Moreover, MIN tumors have a better prognosis than do tumors with a CIN phenotype and respond better to adjuvant chemotherapy.

[0013] Incidence and mortality rates for this disease increase greatly with age, particularly after the age of 60. Stage of disease at diagnosis also affects overall survival rates. Patients having lesions confined to the colonic wall have a high probability of surviving 5 or more years while patients with metastatic disease have a very low probability of survival. It is thought that most colorectal cancers develop over a course of 5-10 years from a precursor lesion called an adenomatous polyp. The potential of these lesions to result in adenocarcinoma has been shown to increase with both polyp size and degree of dysplasia. Because of the slow progression of this disease, early detection through routine screening can result in significant improvement of survival rates. Several randomized trials over the last 20 years have shown that screening test can reduce mortality over 30%, even though the tests used were not highly sensitive. The current guidelines for colorectal screening according to the American Cancer Society utilizes one of five different options for screening in average risk individuals 50 years of age or older. These options include 1) fecal occult blood test (FOBT) annually, 2) flexible sigmoidoscopy every five years, 3) annual FPBT plus flexible sigmoidoscopy every five years, 4) double contrast barium enema (DCBE) every five years or 5) colonoscopy every ten years. Even though these testing procedures are well accepted by the medical community, the implementation of widespread screening for colorectal cancer has not been realized. Patient compliance is a major factor for limited use due to the discomfort or inconvenience associated with the procedures. FOBT testing, although a non-invasive procedure, requires dietary and other restrictions 3-5 days prior to testing. Sensitivity levels for this test are also very low for colorectal adenocarcinoma with wide variability depending on the trial. Sensitivity measurements for detection of adenomas is even less since most adenomas do not bleed. In contrast, sensitivity for more invasive procedures such as sigmoidoscopy and colonoscopy are quite high because of direct visualization of the lumen of the colon. No randomized trials have evaluated the efficacy of these techniques, however, using data from case-control studies and data from the National Polyp Study (U.S.) it has been shown that removal of adenomatous polyps results in a 76-90% reduction in CRC incidence. Sigmoidoscopy has the limitation of only visualizing the left side of the colon leaving lesions in the right colon undetected. Both scoping procedures are expensive, require cathartic preparation and have increased risk of morbidity and mortality. Improved tests with increased sensitivity, specificity, ease of use and decreased costs are clearly needed before general widespread screening for colorectal cancer becomes routine.

[0014] Molecular disease markers offer several advantages over other types of markers, one advantage being that even samples of very small sizes and/or samples whose tissue architecture has not been maintained can be analyzed quite efficiently. Within the last decade a number of genes have been shown to be differentially expressed between normal and colon carcinomas. However, no single or combination of marker has been shown to be sufficient for the diagnosis of colon carcinomas. High-dimensional mRNA based approaches have recently been shown to be able to provide a better means to distinguish between different tumor types and benign and malignant lesions. However its application as a routine diagnostic tool in a clinical environment is impeded by the extreme instability of mRNA, the rapidly occurring expression changes following certain triggers (e.g., sample collection), and, most importantly, the large amount of mRNA needed for analysis (Lipshutz, R. J. et al., Nature Genetics 21:20-24, 1999; Bowtell, D. D. L. Nature genetics suppl. 21:25-32, 1999), which often cannot be obtained from a routine biopsy.

[0015] There is a need in the art for a sensitive diagnostic or prognostic assay for colon cell proliferative disorders that is based, at least in part, on detection of differential methylation of CpG dinucleotide sequences, and that has a diagnostic or prognostic accuracy of greater than about 80%, preferably greater than about 85% or about 90%, more preferably greater than about 95%, and most preferably greater than about 98%.

### SUMMARY OF THE INVENTION

[0016] The present invention provides novel methods and nucleic acids useful for detecting, or detecting and distinguishing between or among colorectal cell proliferative disorders, most preferrably colorectal carcinoma, colon adenomas and colon polyps. The invention provides a method for the analysis of biological samples for features associated with the development of colon cell proliferative disorders, the method characterised in that at least one nucleic acid, or a fragment thereof, from the group consisting of SEQ ID NO:1 to SEQ ID NO:355 is/are contacted with a reagent or series of reagents capable of distinguishing between methylated and non methylated CpG dinucleotides within the genomic sequence, or sequences of interest.

[0017] The present invention provides a method for ascertaining genetic and/or epigenetic parameters of genomic DNA. The method has utility for the improved diagnosis, treatment and monitoring of colon cell proliferative disorders, more specifically by enabling the improved identification of, and differentiation between or among subclasses of said disorders and the genetic predisposition to said disorders. The invention presents improvements over the art in that, inter alia, it enables an accurate and highly specific classification of colon cell proliferative disorders, thereby allowing for improved and informed treatment of patients.

[0018] Preferably, the source of the test sample is selected from the group consisting of cells or cell lines, histological slides, biopsies, paraffin-embedded tissue, bodily fluids, ejaculate, urine, blood, and combinations thereof. Preferably, the source is biopsies, bodily fluids, ejaculate, urine, or blood.

[0019] Specifically, the present invention provides a method for detecting colon cell proliferative disorders, comprising: obtaining a biological sample comprising genomic nucleic acid(s); contacting the nucleic acid(s), or a fragment thereof, with one reagent or a plurality of reagents sufficient for distinguishing between methylated and non methylated CpG dinucleotide sequences within a target sequence of the subject nucleic acid, wherein the target sequence comprises, or hybridizes under stringent conditions to, a sequence comprising at least 18 contiguous nucleotides of a sequence selected from the group consisting of SEQ ID NO:1 to 355; and determining, based at least in part on said distinguishing, the methylation state of at least one target CpG dinucleotide sequence, or an average, or a value reflecting an average methylation state of a plurality of target CpG dinucleotide sequences. Preferably, the contiguous nucleotides comprise at least one CpG dinucleotide sequence. Preferably, distinguishing between methylated and non methylated CpG dinucleotide sequences within the target sequence comprises methylation state-dependent conversion or non-conversion of at least one such CpG dinucleotide sequence to the corresponding converted or non-converted dinucleotide sequence within a sequence selected from the group consisting of SEQ ID NO:72 to SEQ ID NO:355, and contiguous regions thereof corresponding to the target sequence.

[0020] Additional embodiments provide a method for the detection of colon cell proliferative disorders, comprising: obtaining a biological sample having subject genomic DNA; extracting, or otherwise isolating the genomic DNA; treating the extracted or otherwise isolated genomic DNA, or a fragment thereof, with one or more reagents to convert 5-position unmethylated cytosine bases to uracil or to another base that is detectably dissimilar to cytosine in terms of hybridization properties; contacting the treated genomic DNA, or the treated fragment thereof, with an amplification enzyme and at least two primers comprising, in each case a contiguous sequence at least 9 nucleotides in length that is complementary to, or hybridizes under moderately stringent or stringent conditions to a sequence selected from the group consisting SEQ ID NO:72 to SEQ ID NO: 355, and complements thereof, wherein the treated DNA or the fragment thereof is either amplified to produce an amplificate, or is not amplified; and determining, based on a presence or absence of, or on a property of said amplificate, the methylation state of at least one CpG dinucleotide sequence selected from the group consisting of SEQ ID NO: 1 to SEQ ID NO: 71, or an average, or a value reflecting an average methylation state of a plurality of CpG dinucleotide sequences thereof Preferably, at least one such hybridizing nucleic acid molecule or peptide nucleic acid molecule is bound to a solid phase. Further embodiments provide a method for the analysis of colon cell proliferative disorders, comprising: obtaining a biological sample having subject genomic DNA; extracting, or otherwise isolating the genomic DNA; contacting the extracted or otherwise isolated genomic DNA, or a fragment thereof, comprising one or more sequences selected from the group consisting of SEQ ID NO:1 to SEQ ID NO:71 or a sequence that hybridizes under stringent conditions thereto, with one or more methylation-sensitive restriction enzymes, wherein the genomic DNA is either digested thereby to produce digestion fragments, or is not digested thereby; and determining, based on a presence or absence of, or on property of at least one such fragment, the methylation state of at least one CpG dinucleotide sequence of one or more sequences selected from the group consisting of SEQ ID NO:1 to SEQ ID NO:71, or an average, or a value reflecting an average methylation state of a plurality of CpG dinucleotide sequences thereof. Preferably, the digested or undigested genomic DNA is amplified prior to said determining.

[0021] Additional embodiments provide novel genomic and chemically modified nucleic acid sequences, as well as oligonucleotides and/or PNA-oligomers for analysis of cytosine methylation patterns within sequences from the group consisting of SEQ ID NO:1 to SEQ ID NO:71.

### BRIEF DESCRIPTION OF THE DRAWINGS

[0022] The patent or application file contains at least one drawing executed in color. Copies of this patent or patent application publication with color drawings will be provided by the Office upon request and payment of the necessary fee.

[0023] FIG. 1 represents the sequencing data for a fragment of SEQ ID NO:46 according to EXAMPLE 2 herein below. Each row of the matrix represents a single CpG dinucleotide site within the fragment and each column is an individual DNA sample (sample designations are listed on the X-axis). The vertical calibration bar on the left correlates the intensity of shading or color with the percent of methylation; with the degree of methylation represented by the darkness of each position within the column from black (or blue) representing 100% methylation to light grey(or yellow) representing 0% methylation. Colon cancer samples are to the left of the central vertical black line and healthy colon samples are to the right of the vertical black line.

[0024] FIG. 2 represents the sequencing data for a fragment of SEQ ID NO: 14 according to EXAMPLE 2 herein below. Each row of the matrix represents a single CpG site within the fragment and each column is an individual DNA sample (sample designations are listed on the X-axis). The vertical calibration bar on the left correlates the intensity of shading or color with the percent of methylation; with the degree of methylation represented by the darkness of each position within the column from black (or blue) representing 100% methylation to light grey(or yellow) representing 0% methylation. Colon cancer samples are to the left of the central vertical black line and healthy colon samples are to the right of the central vertical black line.

[0025] FIG. 3 represents the sequencing data for a fragment of SEQ ID NO:69 according to EXAMPLE 2 herein below. Each row of the matrix represents a single CpG site within the fragment and each column is an individual DNA sample (sample designations are listed on the X-axis). The vertical calibration bar on the left correlates the intensity of shading or color with the percent of methylation; with the degree of methylation represented by the darkness of each position within the column from black (or blue) representing 100% methylation to light grey(or yellow) representing 0% methylation. Colon cancer samples are to the left of the left vertical black line, healthy colon samples are grouped between the left and right black lines, and peripheral blood lymphocytes (PBL) are grouped to the right of the right black vertical line.

### DETAILED DESCRIPTION OF THE INVENTION

[0026] Definitions:

[0027] The term “Observed/Expected Ratio” (“O/E Ratio”) refers to the frequency of CpG dinucleotides within a particular DNA sequence, and corresponds to the [number of CpG sites/(number of C bases×number of G bases)]×band length for each fragment.

[0028] The term “CpG island” refers to a contiguous region of genomic DNA that satisfies the criteria of (1) having a frequency of CpG dinucleotides corresponding to an “Observed/Expected Ratio” >0.6, and (2) having a “GC Content” >0.5. CpG islands are typically, but not always, between about 0.2 to about 1 kb, or to about 2 kb in length.

[0029] The term “methylation state” or “methylation status” refers to the presence or absence of 5-methylcytosine (“5-mCyt”) at one or a plurality of CpG dinucleotides within a DNA sequence. Methylation states at one or more particular palindromic CpG methylation sites (each having two CpG CpG dinucleotide sequences) within a DNA sequence include “unmethylated,” “fully-methylated” and “hemi-methylated.”

[0030] The term “hemi-methylation” or “hemimethylation” refers to the methylation state of a palindromic CpG methylation site, where only a single cytosine in one of the two CpG dinucleotide sequences of the palindromic CpG methylation site is methylated (e.g., 5′-CC^{M}GG-3′ (top strand): 3′-GGCC-5′ (bottom strand)).

[0031] The term “hypermethylation” refers to the average methylation state corresponding to an increased presence of 5-mCyt at one or a plurality of CpG dinucleotides within a DNA sequence of a test DNA sample, relative to the amount of 5-mCyt found at corresponding CpG dinucleotides within a normal control DNA sample.

[0032] The term “hypomethylation” refers to the average methylation state corresponding to a decreased presence of 5-mCyt at one or a plurality of CpG dinucleotides within a DNA sequence of a test DNA sample, relative to the amount of 5-mCyt found at corresponding CpG dinucleotides within a normal control DNA sample.

[0033] The term “microarray” refers broadly to both “DNA microarrays,” and ‘DNA chip(s),’ as recognized in the art, encompasses all art-recognized solid supports, and encompasses all methods for affixing nucleic acid molecules thereto or synthesis of nucleic acids thereon.

[0034] “Genetic parameters” are mutations and polymorphisms of genes and sequences further required for their regulation. To be designated as mutations are, in particular, insertions, deletions, point mutations, inversions and polymorphisms and, particularly preferred, SNPs (single nucleotide polymorphisms).

[0035] “Epigenetic parameters” are, in particular, cytosine methylations. Further epigenetic parameters include, for example, the acetylation of histones which, however, cannot be directly analyzed using the described method but which, in turn, correlate with the DNA methylation.

[0036] The term “bisulfite reagent” refers to a reagent comprising bisulfite, disulfite, hydrogen sulfite or combinations thereof, useful as disclosed herein to distinguish between methylated and unmethylated CpG dinucleotide sequences.

[0037] The term “Methylation assay” refers to any assay for determining the methylation state of one or more CpG dinucleotide sequences within a sequence of DNA.

[0038] The term “MS.AP-PCR” (Methylation-Sensitive Arbitrarily-Primed Polymerase Chain Reaction) refers to the art-recognized technology that allows for a global scan of the genome using CG-rich primers to focus on the regions most likely to contain CpG dinucleotides, and described by Gonzalgo et al., Cancer Research 57:594-599, 1997.

[0039] The term “MethyLight™” refers to the art-recognized fluorescence-based real-time PCR technique described by Eads et al., Cancer Res. 59:2302-2306, 1999.

[0040] The term “HeavyMethyl™” assay, in the embodiment thereof implemented herein, refers to a HeavyMethyl™ MethylLight™ assay, which is a variation of the MethylLight™ assay, wherein the MethylLight™ assay is combined with methylation specific blocking probes covering CpG positions between the amplification primers.

[0041] The term “Ms-SNuPE” (Methylation-sensitive Single Nucleotide Primer Extension) refers to the art-recognized assay described by Gonzalgo & Jones, Nucleic Acids Res. 25:2529-2531, 1997.

[0042] The term “MSP” (Methylation-specific PCR) refers to the art-recognized methylation assay described by Herman et al. Proc. Natl. Acad. Sci. USA 93:9821-9826, 1996, and by U.S. Pat. No. 5,786,146.

[0043] The term “COBRA” (Combined Bisulfite Restriction Analysis) refers to the art-recognized methylation assay described by Xiong & Laird, Nucleic Acids Res. 25:2532-2534, 1997.

[0044] The term “MCA” (Methylated CpG Island Amplification) refers to the methylation assay described by Toyota et al., Cancer Res. 59:2307-12, 1999, and in WO 00/26401A1.

[0045] The term “hybridization” is to be understood as a bond of an oligonucleotide to a complementary sequence along the lines of the Watson-Crick base pairings in the sample DNA, forming a duplex structure.

[0046] “Stringent hybridization conditions,” as defined herein, involve hybridizing at 68° C. in 5×SSC/5× Denhardt's solution/1.0% SDS, and washing in 0.2×SSC/0.1% SDS at room temperature, or involve the art-recognized equivalent thereof (e.g., conditions in which a hybridization is carried out at 60° C. in 2.5×SSC buffer, followed by several washing steps at 37° C. in a low buffer concentration, and remains stable). Moderately stringent conditions, as defined herein, involve including washing in 3×SSC at 42° C., or the art-recognized equivalent thereof. The parameters of salt concentration and temperature can be varied to achieve the optimal level of identity between the probe and the target nucleic acid. Guidance regarding such conditions is available in the art, for example, by Sambrook et al., 1989, Molecular Cloning, A Laboratory Manual, Cold Spring Harbor Press, N.Y.; and Ausubel et al. (eds.), 1995, Current Protocols in Molecular Biology, (John Wiley & Sons, N.Y.) at Unit 2.10.

[0047] The terms “array SEQ ID NO,” “composite array SEQ ID NO,” or “composite array sequence” refer to a sequence, hypothetical or otherwise, consisting of a head-to-tail (5′ to 3′) linear composite of all individual contiguous sequences of a subject array (e.g., a head-to-tail composite of SEQ ID NOS:1-71, in that order).

[0048] The terms “array SEQ ID NO node,” “composite array SEQ ID NO node,” or “composite array sequence node” refer to a junction between any two individual contiguous sequences of the “array SEQ ID NO,” the “composite array SEQ ID NO,” or the “composite array sequence.”

[0049] In reference to composite array sequences, the phrase “contiguous nucleotides” refers to a contiguous sequence region of any individual contiguous sequence of the composite array, but does not include a region of the composite array sequence that includes a “node,” as defined herein above.

[0050] Overview:

[0051] The present invention provides for molecular genetic markers that have novel utility for the analysis of methylation patterns associated with the development of colon cell proliferative disorders. Said markers may be used for detecting, or for detecting and distinguishing between or among colon cell proliferative disorders.

[0052] Bisulfite Modification of DNA is an Art-Recognized Tool used to Assess CpG Methylation Status.

[0053] 5-methylcytosine is the most frequent covalent base modification in the DNA of eukaryotic cells. It plays a role, for example, in the regulation of the transcription, in genetic imprinting, and in tumorigenesis. Therefore, the identification of 5-methylcytosine as a component of genetic information is of considerable interest. However, 5-methylcytosine positions cannot be identified by sequencing, because 5-methylcytosine has the same base pairing behavior as cytosine. Moreover, the epigenetic information carried by 5-methylcytosine is completely lost during, e.g., PCR amplification.

[0054] The most frequently used method for analyzing DNA for the presence of 5-methylcytosine is based upon the specific reaction of bisulfite with cytosine whereby, upon subsequent alkaline hydrolysis, cytosine is converted to uracil which corresponds to thymine in its base pairing behavior. Significantly, however, 5-methylcytosine remains unmodified under these conditions. Consequently, the original DNA is converted in such a manner that methylcytosine, which originally could not be distinguished from cytosine by its hybridization behavior, can now be detected as the only remaining cytosine using standard, art-recognized molecular biological techniques, for example, by amplification and hybridization, or by sequencing. All of these techniques are based on differential base pairing properties, which can now be fully exploited.

[0055] The prior art, in terms of sensitivity, is defined by a method comprising enclosing the DNA to be analyzed in an agarose matrix, thereby preventing the diffusion and renaturation of the DNA (bisulfite only reacts with single-stranded DNA), and replacing all precipitation and purification steps with fast dialysis (Olek A, et al., A modified and improved method for bisulfite based cytosine methylation analysis, Nucleic Acids Res. 24:5064-6, 1996). It is thus possible to analyze individual cells for methylation status, illustrating the utility and sensitivity of the method. An overview of art-recognized methods for detecting 5-methylcytosine is provided by Rein, T., et al., Nucleic Acids Res., 26:2255, 1998.

[0056] The bisulfite technique, barring few exceptions (e.g., Zeschnigk M, et al., Eur J Hum Genet. 5:94-98, 1997), is currently only used in research. In all instances, short, specific fragments of a known gene are amplified subsequent to a bisulfite treatment, and either completely sequenced (Olek & Walter, Nat Genet. 1997 17:275-6, 1997), subjected to one or more primer extension reactions (Gonzalgo & Jones, Nucleic Acids Res., 25:2529-31, 1997; WO 95/00669; U.S. Pat. No. 6,251,594) to analyze individual cytosine positions, or treated by enzymatic digestion (Xiong & Laird, Nucleic Acids Res., 25:2532-4, 1997). Detection by hybridization has also been described in the art (Olek et al., WO 99/28498). Additionally, use of the bisulfite technique for methylation detection with respect to individual genes has been described (Grigg & Clark, Bioessays, 16:431-6, 1994; Zeschnigk M, et al., Hum Mol Genet., 6:387-95, 1997; Feil R, et al., Nucleic Acids Res., 22:695-, 1994; Martin V, et al., Gene, 157:261-4, 1995; WO 9746705 and WO 9515373).

[0057] The present invention provides for the use of the bisulfite technique for determination of the methylation status of CpG dinuclotide sequences within genomic sequences from the group consisting of SEQ ID NO:1 to SEQ ID NO:71. According to the present invention, determination of the methylation status of CpG dinuclotide sequences within sequences from the group consisting of SEQ ID NO:1 to SEQ ID NO:71 has diagnostic and prognostic utility.

[0058] Methylation Assay Procedures.

[0059] Various methylation assay procedures are known in the art, and can be used in conjunction with the present invention. These assays allow for determination of the methylation state of one or a plurality of CpG dinucleotides (e.g., CpG islands) within a DNA sequence. Such assays involve, among other techniques, DNA sequencing of bisulfite-treated DNA, PCR (for sequence-specific amplification), Southern blot analysis, and use of methylation-sensitive restriction enzymes.

[0060] For example, genomic sequencing has been simplified for analysis of DNA methylation patterns and 5-methylcytosine distribution by using bisulfite treatment (Frommer et al., Proc. Natl. Acad. Sci. USA 89:1827-1831, 1992). Additionally, restriction enzyme digestion of PCR products amplified from bisulfite-converted DNA is used, e.g., the method described by Sadri & Hornsby (Nucl. Acids Res. 24:5058-5059, 1996), or COBRA (Combined Bisulfite Restriction Analysis) (Xiong & Laird, Nucleic Acids Res. 25:2532-2534, 1997).

[0061] COBRA.

[0062] COBRA analysis is a quantitative methylation assay useful for determining DNA methylation levels at specific gene loci in small amounts of genomic DNA (Xiong & Laird, Nucleic Acids Res. 25:2532-2534, 1997). Briefly, restriction enzyme digestion is used to reveal methylation-dependent sequence differences in PCR products of sodium bisulfite-treated DNA. Methylation-dependent sequence differences are first introduced into the genomic DNA by standard bisulfite treatment according to the procedure described by Frommer et al. (Proc. Natl. Acad. Sci. USA 89:1827-1831, 1992). PCR amplification of the bisulfite converted DNA is then performed using primers specific for the interested CpG islands, followed by restriction endonuclease digestion, gel electrophoresis, and detection using specific, labeled hybridization probes. Methylation levels in the original DNA sample are represented by the relative amounts of digested and undigested PCR product in a linearly quantitative fashion across a wide spectrum of DNA methylation levels. In addition, this technique can be reliably applied to DNA obtained from microdissected paraffin-embedded tissue samples. Typical reagents (e.g., as might be found in a typical COBRA-based kit) for COBRA analysis may include, but are not limited to: PCR primers for specific gene (or methylation-altered DNA sequence or CpG island); restriction enzyme and appropriate buffer; gene-hybridization oligo; control hybridization oligo; kinase labeling kit for oligo probe; and radioactive nucleotides. Additionally, bisulfite conversion reagents may include: DNA denaturation buffer; sulfonation buffer; DNA recovery reagents or kits (e.g., precipitation, ultrafiltration, affinity column); desulfonation buffer; and DNA recovery components.

[0063] Preferably, assays such as “MethyLight™” (a fluorescence-based real-time PCR technique) (Eads et al., Cancer Res. 59:2302-2306, 1999), Ms-SNuPE (Methylation-sensitive Single Nucleotide Primer Extension) reactions (Gonzalgo & Jones, Nucleic Acids Res. 25:2529-2531, 1997), methylation-specific PCR (“MSP”; Herman et al., Proc. Natl. Acad. Sci. USA 93:9821-9826, 1996; U.S. Pat. No. 5,786,146), and methylated CpG island amplification (“MCA”; Toyota et al., Cancer Res. 59:2307-12, 1999) are used alone or in combination with other of these methods.

[0064] MethyLight™.

[0065] The MethyLight™ assay is a high-throughput quantitative methylation assay that utilizes fluorescence-based real-time PCR (TaqMan®) technology that requires no further manipulations after the PCR step (Eads et al., Cancer Res. 59:2302-2306, 1999). Briefly, the MethyLight™ process begins with a mixed sample of genomic DNA that is converted, in a sodium bisulfite reaction, to a mixed pool of methylation-dependent sequence differences according to standard procedures (the bisulfite process converts unmethylated cytosine residues to uracil). Fluorescence-based PCR is then performed either in an “unbiased” (with primers that do not overlap known CpG methylation sites) PCR reaction, or in a “biased” (with PCR primers that overlap known CpG dinucleotides) reaction. Sequence discrimination can occur either at the level of the amplification process or at the level of the fluorescence detection process, or both.

[0066] The MethyLight™ assay may be used as a quantitative test for methylation patterns in the genomic DNA sample, wherein sequence discrimination occurs at the level of probe hybridization. In this quantitative version, the PCR reaction provides for unbiased amplification in the presence of a fluorescent probe that overlaps a particular putative methylation site. An unbiased control for the amount of input DNA is provided by a reaction in which neither the primers, nor the probe overlie any CpG dinucleotides. Alternatively, a qualitative test for genomic methylation is achieved by probing of the biased PCR pool with either control oligonucleotides that do not “cover” known methylation sites (a fluorescence-based version of the “MSP” technique), or with oligonucleotides covering potential methylation sites.

[0067] The MethyLight™ process can by used with a “TaqMan®” probe in the amplification process. For example, double-stranded genomic DNA is treated with sodium bisulfite and subjected to one of two sets of PCR reactions using TaqMan® probes; e.g., with either biased primers and TaqMan® probe, or unbiased primers and TaqMan® probe. The TaqMan® probe is dual-labeled with fluorescent “reporter” and “quencher” molecules, and is designed to be specific for a relatively high GC content region so that it melts out at about 10° C. higher temperature in the PCR cycle than the forward or reverse primers. This allows the TaqMan® probe to remain fully hybridized during the PCR annealing/extension step. As the Taq polymerase enzymatically synthesizes a new strand during PCR, it will eventually reach the annealed TaqMan® probe. The Taq polymerase 5′ to 3′ endonuclease activity will then displace the TaqMan® probe by digesting it to release the fluorescent reporter molecule for quantitative detection of its now unquenched signal using a real-time fluorescent detection system.

[0068] Typical reagents (e.g., as might be found in a typical MethyLight™-based kit) for MethyLight™ analysis may include, but are not limited to: PCR primers for specific gene (or methylation-altered DNA sequence or CpG island); TaqMan® probes; optimized PCR buffers and deoxynucleotides; and Taq polymerase.

[0069] Ms-SNuPE.

[0070] The Ms-SNuPE technique is a quantitative method for assessing methylation differences at specific CpG sites based on bisulfite treatment of DNA, followed by single-nucleotide primer extension (Gonzalgo & Jones, Nucleic Acids Res. 25:2529-2531, 1997). Briefly, genomic DNA is reacted with sodium bisulfite to convert unmethylated cytosine to uracil while leaving 5-methylcytosine unchanged. Amplification of the desired target sequence is then performed using PCR primers specific for bisulfite-converted DNA, and the resulting product is isolated and used as a template for methylation analysis at the CpG site(s) of interest. Small amounts of DNA can be analyzed (e.g., microdissected pathology sections), and it avoids utilization of restriction enzymes for determining the methylation status at CpG sites.

[0071] Typical reagents (e.g., as might be found in a typical Ms-SNuPE-based kit) for Ms-SNuPE analysis may include, but are not limited to: PCR primers for specific gene (or methylation-altered DNA sequence or CpG island); optimized PCR buffers and deoxynucleotides; gel extraction kit; positive control primers; Ms-SNuPE primers for specific gene; reaction buffer (for the Ms-SNuPE reaction); and radioactive nucleotides. Additionally, bisulfite conversion reagents may include: DNA denaturation buffer; sulfonation buffer; DNA recovery regents or kit (e.g., precipitation, ultrafiltration, affinity column); desulfonation buffer; and DNA recovery components.

[0072] MSP.

[0073] MSP (methylation-specific PCR) allows for assessing the methylation status of virtually any group of CpG sites within a CpG island, independent of the use of methylation-sensitive restriction enzymes (Herman et al. Proc. Natl. Acad Sci. USA 93:9821-9826, 1996; U.S. Pat. No. 5,786,146). Briefly, DNA is modified by sodium bisulfite converting all unmethylated, but not methylated cytosines to uracil, and subsequently amplified with primers specific for methylated versus unmethylated DNA. MSP requires only small quantities of DNA, is sensitive to 0.1% methylated alleles of a given CpG island locus, and can be performed on DNA extracted from paraffin-embedded samples. Typical reagents (e.g., as might be found in a typical MSP-based kit) for MSP analysis may include, but are not limited to: methylated and unmethylated PCR primers for specific gene (or methylation-altered DNA sequence or CpG island), optimized PCR buffers and deoxynucleotides, and specific probes.

[0074] MCA.

[0075] The MCA technique is a method that can be used to screen for altered methylation patterns in genomic DNA, and to isolate specific sequences associated with these changes (Toyota et al., Cancer Res. 59:2307-12, 1999); Briefly, restriction enzymes with different sensitivities to cytosine methylation in their recognition sites are used to digest genomic DNAs from primary tumors, cell lines, and normal tissues prior to arbitrarily primed PCR amplification. Fragments that show differential methylation are cloned and sequenced after resolving the PCR products on high-resolution polyacrylamide gels. The cloned fragments are then used as probes for Southern analysis to confirm differential methylation of these regions. Typical reagents (e.g., as might be found in a typical MCA-based kit) for MCA analysis may include, but are not limited to: PCR primers for arbitrary priming Genomic DNA; PCR buffers and nucleotides, restriction enzymes and appropriate buffers; gene-hybridization oligos or probes; control hybridization oligos or probes.

[0076] Genomic Sequences According To SEQ. ID NO:1 to SEQ ID NO:71, and Treated Variants Thereof According to SEQ ID NO:72 to SEQ ID NO:355, Were Determined to have Utility for the Detection, Classification and/or Treatment of Colon Cell Proliferative Disorders

[0077] The present invention is based upon the analysis of methylation levels within one or more genomic sequences taken from the group consisting SEQ ID NO:1 to SEQ ID NO:71.

[0078] Particular embodiments of the present invention provide a novel application of the analysis of methylation levels and/or patterns within said sequences that enables a precise detection, characterisation and/or treatment of colon cell proliferative disorders. Early detection of colon cell proliferative disorders is directly linked with disease prognosis, and the disclosed method thereby enables the physician and patient to make better and more informed treatment decisions.

### FURTHER IMPROVEMENTS

[0079] The present invention provides novel uses for genomic sequences selected from the group consisting of SEQ ID NO:1 to SEQ ID NO:71. Additional embodiments provide modified variants of SEQ ID NO:1 to SEQ ID NO:71, as well as oligonucleotides and/or PNA-oligomers for analysis of cytosine methylation patterns within SEQ ID NO:1 to SEQ ID NO:71 .

[0080] An objective of the invention comprises analysis of the methylation state of one or more CpG dinucleotides within at least one of the genomic sequences selected from the group consisting of SEQ ID NO:1 to SEQ ID NO:71 and sequences complementary thereto.

[0081] In a preferred embodiment of the method, the objective comprises analysis of a modified nucleic acid comprising a sequence of at least 18 contiguous nucleotide bases in length of a sequence selected from the group consisting of SEQ ID NO:72 to SEQ ID NO:355, wherein said sequence comprises at least one CpG, TpA or CpA dinucleotide and sequences complementary thereto. The sequences of SEQ ID NO:72 to SEQ ID NO:355 provide modified versions of the nucleic acid according to SEQ ID NO:1 to SEQ ID NO:71, wherein the modification of each genomic sequence results in the synthesis of a nucleic acid having a sequence that is unique and distinct from said genomic sequence as follows:

[0082] For each sense strand genomic DNA, e.g., sense strand of SEQ ID NO:1, four converted versions are disclosed. A first version wherein “C”→“T,” but “CpG” remains “CpG” (i.e., corresponds to a case where, for the genomic sequence, all “C” residues of CpG dinucleotide sequences are methylated and are thus not converted); a second version discloses the complement of the disclosed genomic DNA sequence (i.e., antisense strand), wherein “C”→“T,” but “CpG” remains “CpG” (ie., corresponds to a case where, for all “C” residues of CpG dinucleotide sequences are methylated and are thus not converted). The ‘upmethylated’ converted sequences of SEQ ID NO:1 to SEQ ID NO:71 correspond to SEQ ID NO:72 to SEQ ID NO:213. A third chemically converted version of each genomic sequences is provided, wherein “C”→“T” for all “C” residues, including those of “CpG” dinucleotide sequences (i.e., corresponds to a case where, for the genomic sequences, all “C” residues of CpG dinucleotide sequences are unmethylated); and a final chemically converted version of each sequence, discloses the complement of the disclosed genomic DNA sequence (i.e., antisense strand), wherein “C”→“T” for all “C” residues, including those of “CpG” dinucleotide sequences (ie., corresponds to acase where, for the complement (antisense strand) of each genomic sequence, all “C” residues of CpG dinucleotide sequences are unmethylated). The ‘downmethylated’ converted sequences of SEQ ID NO:1 to SEQ ID NO:71 correspond to SEQ ID NO:214 to SEQ ID NO:355.

[0083] Significantly, heretofore, the nucleic acid sequences and molecules according to SEQ ID NO:1 to SEQ ID NO:355 were not implicated in or connected with the detection, classification or treatment of colon cell proliferative disorders.

[0084] In an alternative preferred embodiment, such analysis comprises the use of an oligonucleotide or oligomer for detecting the cytosine methylation state within genomic or pretreated (chemically modified) DNA, according to SEQ ID NO:1 to SEQ ID NO:355. Said oligonucleotide or oligomer comprising a nucleic acid sequence having a length of at least nine (9) nucleotides which hybridizes, under moderately stringent or stringent conditions (as defined herein above), to a pretreated nucleic acid sequence according to SEQ ID NO:72 to SEQ ID NO:355 and/or sequences complementary thereto, or to a genomic sequence according to SEQ ID NO:1 to SEQ ID NO:71 and/or sequences complementary thereto.

[0085] Thus, the present invention includes nucleic acid molecules, including oligomers (e.g., oligonucleotides and peptide nucleic acid (PNA) molecules (PNA-oligomers)) that hybridize under moderately stringent and/or stringent hybridization conditions to all or a portion of the sequences SEQ ID NO:1 to SEQ ID NO:355, or to the complements thereof. The hybridizing portion of the hybridizing nucleic acids is typically at least 9, 15, 20, 25, 30 or 35 nucleotides in length. However, longer molecules have inventive utility, and are thus within the scope of the present invention.

[0086] Preferably, the hybridizing portion of the inventive hybridizing nucleic acids is at least 95%, or at least 98%, or 100% identical to the sequence, or to a portion thereof of SEQ ID NO:1 to SEQ ID NO:355, or to the complements thereof.

[0087] Hybridizing nucleic acids of the type described herein can be used, for example, as a primer (e.g., a PCR primer), or a diagnostic and/or prognostic probe or primer. Preferably, hybridization of the oligonucleotide probe to a nucleic acid sample is performed under stringent conditions and the probe is 100% identical to the target sequence. Nucleic acid duplex or hybrid stability is expressed as the melting temperature or Tm, which is the temperature at which a probe dissociates from a target DNA. This melting temperature is used to define the required stringency conditions.

[0088] For target sequences that are related and substantially identical to the corresponding sequence of SEQ ID NO:1 to SEQ ID NO:71 (such as allelic variants and SNPs), rather than identical, it is useful to first establish the lowest temperature at which only homologous hybridization occurs with a particular concentration of salt (e.g., SSC or SSPE). Then, assuming that 1% mismatching results in a 1° C. decrease in the Tm, the temperature of the final wash in the hybridization reaction is reduced accordingly (for example, if sequences having >95% identity with the probe are sought, the final wash temperature is decreased by 5° C.). In practice, the change in Tm can be between 0.5° C. and 1.5° C. per 1% mismatch.

[0089] Examples of inventive oligonucleotides of length X (in nucleotides), as indicated by polynucleotide positions with reference to, e.g., SEQ ID NO: 1, include those corresponding to sets (sense and antisense sets) of consecutively overlapping oligonucleotides of length X, where the oligonucleotides within each consecutively overlapping set (corresponding to a given X value) are defined as the finite set of Z oligonucleotides from nucleotide positions:

n to(n+(X−1));

where n=1, 2, 3, . . . (Y−(X−1));

[0090] where Y equals the length (nucleotides or base pairs) of SEQ ID NO:1 (2,280);

[0091] where X equals the common length (in nucleotides) of each oligonucleotide in the set (e.g., X=20 for a set of consecutively overlapping 20-mers); and

[0092] where the number (Z) of consecutively overlapping oligomers of length X for a given SEQ ID NO of length Y is equal to Y−(X−1). For example Z=2,280-19=2,261 for either sense or antisense sets of SEQ ID NO:1, where X=20.

[0093] Preferably, the set is limited to those oligomers that comprise at least one CpQ, TpG or CpA dinucleotide.

[0094] Examples of inventive 20-mer oligonucleotides include the following set of 2,261 oligomers (and the antisense set complementary thereto), indicated by polynucleotide positions with reference to SEQ ID NO:1:

[0095] 1-20, 2-21, 3-22, 4-23, 5-24, . . . 2259-2278, 2260-2279 and 2261-2280.

[0096] Preferably, the set is limited to those oligomers that comprise at least one CpG, TpG or CpA dinucleotide.

[0097] Likewise, examples of inventive 25-mer oligonucleotides include the following set of 2,256 oligomers (and the antisense set complementary thereto), indicated by polynucleotide positions with reference to SEQ ID NO:1:

[0098] 1-25, 2-26, 3-27, 4-28, 5-29, . . . 2254-2278, 2255-2279 and 2256-2280.

[0099] Preferably, the set is limited to those oligomers that comprise at least one CpG, TpG or CpA dinucleotide.

[0100] The present invention encompasses, for each of SEQ ID NO:1 to SEQ ID NO:355 (sense and antisense), multiple consecutively overlapping sets of oligonucleotides or modified oligonucleotides of length X, where, e.g., X=9, 10, 17, 20, 22, 23, 25, 27, 30 or 35 nucleotides.

[0101] The oligonucleotides or oligomers according to the present invention constitute effective tools useful to ascertain genetic and epigenetic parameters of the genomic sequence corresponding to SEQ ID NO:1 to SEQ ID NO:71. Preferred sets of such oligonucleotides or modified oligonucleotides of length X are those consecutively overlapping sets of oligomers corresponding to SEQ ID NO:1 to SEQ ID NO:355 (and to the complements thereof). Preferably, said oligomers comprise at least one CpG, TpG or CpA dinucleotide.

[0102] Particularly preferred oligonucleotides or oligomers according to the present invention are those in which the cytosine of the CpG dinucleotide (or of the corresponding converted TpG or CpA dinculeotide) sequences is within the middle third of the oligonucleotide; that is, where the oligonucleotide is, for example, 13 bases in length, the CpG, TpG or CpA dinucleotide is positioned within the fifth to ninth nucleotide from the 5′-end.

[0103] The oligonucleotides of the invention can also be modified by chemically linking the oligonucleotide to one or more moieties or conjugates to enhance the activity, stability or detection of the oligonucleotide. Such moieties or conjugates include chromophores, fluorophors, lipids such as cholesterol, cholic acid, thioether, aliphatic chains, phospholipids, polyamines, polyethylene glycol (PEG), palmityl moieties, and others as disclosed in, for example, U.S. Pat. Nos. 5,514,758, 5,565,552, 5,567,810, 5,574,142, 5,585,481, 5,587,371, 5,597,696 and 5,958,773. The probes may also exist in the form of a PNA (peptide nucleic acid) which has particularly preferred pairing properties. Thus, the oligonucleotide may include other appended groups such as peptides, and may include hybridization-triggered cleavage agents (Krol et al., BioTechniques 6:958-976, 1988) or intercalating agents (Zon, Pharm. Res. 5:539-549, 1988). To this end, the oligonucleotide may be conjugated to another molecule, e.g., a chromophore, fluorophor, peptide, hybridization-triggered cross-linking agent, transport agent, hybridization-triggered cleavage agent, etc.

[0104] The oligonucleotide may also comprise at least one art-recognized modified sugar and/or base moiety, or may comprise a modified backbone or non-natural internucleoside linkage.

[0105] The oligonucleotides or oligomers according to particular embodiments of the present invention are typically used in ‘sets,’ which contain at least one oligomer for analysis of each of the CpG dinucleotides of genomic sequence SEQ ID NO:1 to SEQ ID NO:71 and sequences complementary thereto, or to the corresponding CpG, TpG or CpA dinucleotide within a sequence of the pretreated nucleic acids according to SEQ ID NO:72 to SEQ ID NO:355 and sequences complementary thereto. However, it is anticipated that for economic or other factors it may be preferable to analyze a limited selection of the CpG dinucleotides within said sequences, and the content of the set of oligonucleotides is altered accordingly.

[0106] Therefore, in particular embodiments, the present invention provides a set of at least two (2) (oligonucleotides and/or PNA-oligomers) useful for detecting the cytosine methylation state in pretreated genomic DNA (SEQ ID NO:72 to SEQ ID NO:355), or in genomic DNA (SEQ ID NO:1 to SEQ ID NO:71 and sequences complementary thereto). These probes enable diagnosis, classification and/or therapy of genetic and epigenetic parameters of colon cell proliferative disorders. The set of oligomers may also be used for detecting single nucleotide polymorphisms (SNPs) in pretreated genomic DNA (SEQ ID NO:72 to SEQ ID NO:355), or in genomic DNA (SEQ ID NO:1 to SEQ ID NO:71 and sequences complementary thereto).

[0107] In preferred embodiments, at least one, and more preferably all members of a set of oligonucleotides is bound to a solid phase.

[0108] In further embodiments, the present invention provides a set of at least two (2) oligonucleotides that are used as ‘primer’ oligonucleotides for amplifying DNA sequences of one of SEQ ID NO:1 to SEQ ID NO:355 and sequences complementary thereto, or segments thereof.

[0109] It is anticipated that the oligonucleotides may constitute all or part of an “array” or “DNA chip” (i.e., an arrangement of different oligonucleotides and/or PNA-oligomers bound to a solid phase). Such an array of different oligonucleotide- and/or PNA-oligomer sequences can be characterized, for example, in that it is arranged on the solid phase in the form of a rectangular or hexagonal lattice. The solid-phase surface may comprise, or be composed of silicon, glass, polystyrene, aluminum, steel, iron, copper, nickel, silver, gold, or combinations thereof. Nitrocellulose as well as plastics such as nylon, which can exist in the form of pellets or also as resin matrices, may also be used. An overview of the Prior Art in oligomer array manufacturing can be gathered from a special edition of Nature Genetics (Nature Genetics Supplement, Volume 21, January 1999, and from the literature cited therein). Fluorescently labeled probes are often used for the scanning of immobilized DNA arrays. The simple attachment of Cy3 and Cy5 dyes to the 5′-OH of the specific probe are particularly suitable for fluorescence labels. The detection of the fluorescence of the hybridized probes may be carried out, for example, via a confocal microscope. Cy3 and Cy5 dyes, besides many others, are commercially available.

[0110] It is also anticipated that the oligonucleotides, or particular sequences thereof, may constitute all or part of an “virtual array” wherein the oligonucleotides, or particular sequences thereof, are used, for example, as 'specifiers' as part of, or in combination with a diverse population of unique labeled probes to analyze a complex mixture of analytes. Such a method, for example is described in US 2003/0013091 (U.S. Ser. No. 09/898,743, published 16 Jan. 2003). In such methods, enough labels are generated so that each nucleic acid in the complex mixture (i.e., each analyte) can be uniquely bound by a unique label and thus detected (each label is directly counted, resulting in a digital read-out of each molecular species in the mixture).

[0111] The present invention further provides a method for ascertaining genetic and/or epigenetic parameters of the genomic sequences according to SEQ ID NO:1 to SEQ ID NO:71 within a subject by analyzing cytosine methylation and single nucleotide polymorphisms. Said method comprising contacting a nucleic acid comprising one or more of SEQ ID NO: 1 to SEQ ID NO:71 in a biological sample obtained from said subject with at least one reagent or a series of reagents, wherein said reagent or series of reagents, distinguishes between methylated and non-methylated CpG dinucleotides within the target nucleic acid.

[0112] Preferably, said method comprises the following steps: In the first step, a sample of the tissue to be analysed is obtained. The source may be any suitable source, such as cell lines, histological slides, biopsies, tissue embedded in paraffin, bodily fluids, ejaculate, urine, blood and all possible combinations thereof. The DNA is then extracted or otherwise isolated from the sample. Extraction may be by means that are standard to one skilled in the art, including the use of commercially available kits, detergent lysates, sonification and vortexing with glass beads. Once the nucleic acids have been extracted, the genomic double stranded DNA is used in the analysis.

[0113] In the second step of the method, the genomic DNA sample is treated in such a manner that cytosine bases which are unmethylated at the 5′-position are converted to uracil, thymine, or another base which is dissimilar to cytosine in terms of hybridization behavior. This will be understood as ‘pretreatment’ or ‘treatment’ herein.

[0114] The above-described treatment of genomic DNA is preferably carried out with bisulfite (hydrogen sulfite, disulfite) and subsequent alkaline hydrolysis which results in a conversion of non-methylated cytosine nucleobases to uracil or to another base which is dissimilar to cytosine in terms of base pairing behavior.

[0115] In the third step of the method, fragments of the pretreated DNA are amplified, using sets of primer oligonucleotides according to the present invention, and an amplification enzyme. The amplification of several DNA segments can be carried out simultaneously in one and the same reaction vessel. Typically, the amplification is carried out using a polymerase chain reaction (PCR). The set of primer oligonucleotides includes at least two oligonucleotides whose sequences are each reverse complementary, identical, or hybridize under stringent or highly stringent conditions to an at least 18-base-pair long segment of the base sequences of one or more of SEQ ID NO:72 to SEQ ID NO:355 and sequences complementary thereto.

[0116] In an alternate embodiment of the method, the methylation status of preselected CpG positions within the nucleic acid sequences comprising one or more of SEQ ID NO:1 to SEQ ID NO:71 may be detected by use of methylation-specific primer oligonucleotides. This technique (MSP) has been described in U.S. Pat. No. 6,265,171 to Herman. The use of methylation status specific primers for the amplification of bisulfite treated DNA allows the differentiation between methylated and unmethylated nucleic acids. MSP primers pairs contain at least one primer which hybridizes to a bisulfite treated CpG dinucleotide. Therefore, the sequence of said primers comprises at least one CpG , TpG or CpA dinucleotide. MSP primers specific for non-methylated DNA contain a “T” at the 3′ position of the C position in the CpG. Preferably, therefore, the base sequence of said primers is required to comprise a sequence having a length of at least 9 nucleotides which hybridizes to a pretreated nucleic acid sequence according to one of SEQ ID NO:72 to SEQ ID NO:355 and sequences complementary thereto, wherein the base sequence of said oligomers comprises at least one CpG, TpG or CpA dinucleotide.

[0117] The fragments obtained by means of the amplification can carry a directly or indirectly detectable label. Preferred are labels in the form of fluorescence labels, radionuclides, or detachable molecule fragments having a typical mass which can be detected in a mass spectrometer. Where said labels are mass labels, it is preferred that the labeled amplificates have a single positive or negative net charge, allowing for better detectability in the mass spectrometer. The detection may be carried out and visualized by means of, e.g., matrix assisted laser desorption/ionization mass spectrometry (MALDI) or using electron spray mass spectrometry (ESI).

[0118] Matrix Assisted Laser Desorption/Ionization Mass Spectrometry (MALDI-TOF) is a very efficient development for the analysis of biomolecules (Karas & Hillenkamp, Anal Chem., 60:2299-301, 1988). An analyte is embedded in a light-absorbing matrix. The matrix is evaporated by a short laser pulse thus transporting the analyte molecule into the vapour phase in an unfragmented manner. The analyte is ionized by collisions with matrix molecules. An applied voltage accelerates the ions into a field-free flight tube. Due to their different masses, the ions are accelerated at different rates. Smaller ions reach the detector sooner than bigger ones. MALDI-TOF spectrometry is well suited to the analysis of peptides and proteins. The analysis of nucleic acids is somewhat more difficult (Gut & Beck, Current Innovations and Future Trends, 1:147-57, 1995). The sensitivity with respect to nucleic acid analysis is approximately 100-times less than for peptides, and decreases disproportionally with increasing fragment size. Moreover, for nucleic acids having a multiply negatively charged backbone, the ionization process via the matrix is considerably less efficient. In MALDI-TOF spectrometry, the selection of the matrix plays an eminently important role. For desorption of peptides, several very efficient matrixes have been found which produce a very fine crystallisation. There are now several responsive matrixes for DNA, however, the difference in sensitivity between peptides and nucleic acids has not been reduced. This difference in sensitivity can be reduced, however, by chemically modifying the DNA in such a manner that it becomes more similar to a peptide. For example, phosphorothioate nucleic acids, in which the usual phosphates of the backbone are substituted with thiophosphates, can be converted into a charge-neutral DNA using simple alkylation chemistry (Gut & Beck, Nucleic Acids Res. 23: 1367-73, 1995). The coupling of a charge tag to this modified DNA results in an increase in MALDI-TOF sensitivity to the same level as that found for peptides. A further advantage of charge tagging is the increased stability of the analysis against impurities, which makes the detection of unmodified substrates considerably more difficult.

[0119] In the fourth step of the method, the amplificates obtained during the third step of the method are analysed in order to ascertain the methylation status of the CpG dinucleotides prior to the treatment.

[0120] In embodiments where the amplificates were obtained by means of MSP amplification, the presence or absence of an amplificate is in itself indicative of the methylation state of the CpG positions covered by the primer, according to the base sequences of said primer.

[0121] Amplificates obtained by means of both standard and methylation specific PCR may be further analyzed by means of hybridization-based methods such as, but not limited to, array technology and probe based technologies as well as by means of techniques such as sequencing and template directed extension.

[0122] In one embodiment of the method, the amplificates synthesised in step three are subsequently hybridized to an array or a set of oligonucleotides and/or PNA probes. In this context, the hybridization takes place in the following manner: the set of probes used during the hybridization is preferably composed of at least 2 oligonucleotides or PNA-oligomers; in the process, the amplificates serve as probes which hybridize to oligonucleotides previously bonded to a solid phase; the non-hybridized fragments are subsequently removed; said oligonucleotides contain at least one base sequence having a length of at least 9 nucleotides which is reverse complementary or identical to a segment of the base sequences specified in the present Sequence Listing; and the segment comprises at least one CpG , TpG or CpA dinucleotide.

[0123] In a preferred embodiment, said dinucleotide is present in the central third of the oligomer. For example, wherein the oligomer comprises one CpG dinucleotide, said dinucleotide is preferably the fifth to ninth nucleotide from the 5′-end of a 13-mer. One oligonucleotide exists for the analysis of each CpG dinucleotide within the sequence according to SEQ ID NO:1 to SEQ ID NO:71, and the equivalent positions within SEQ ID NO:72 to SEQ ID NO:355. Said oligonucleotides may also be present in the form of peptide nucleic acids. The non-hybridized amplificates are then removed.

[0124] In the final step of the method, the hybridized amplificates are detected. In this context, it is preferred that labels attached to the amplificates are identifiable at each position of the solid phase at which an oligonucleotide sequence is located.

[0125] In yet a further embodiment of the method, the genomic methylation status of the CpG positions may be ascertained by means of oligonucleotide probes that are hybridised to the bisulfite treated DNA concurrently with the PCR amplification primers (wherein said primers may either be methylation specific or standard).

[0126] A particularly preferred embodiment of this method is the use of fluorescence-based Real Time Quantitative PCR (Heid et al., Genome Res. 6:986-994, 1996; also see U.S. Pat. No. 6,331,393) employing a dual-labeled fluorescent oligonucleotide probe (TaqMan™ PCR, using an ABI Prism 7700 Sequence Detection System, Perkin Elmer Applied Biosystems, Foster City, Calif.). The TaqMan™ PCR reaction employs the use of a nonextendible interrogating oligonucleotide, called a TaqMan™ probe, which, in preferred imbodiments, is designed to hybridize to a GpC-rich sequence located between the forward and reverse amplification primers. The TaqMan™ probe further comprises a fluorescent “reporter moiety” and a “quencher moiety” covalently bound to linker moieties (e.g., phosphoramidites) attached to the nucleotides of the TaqMan™ oligonucleotide. For analysis of methylation within nucleic acids subsequent to bisulfite treatment, it is required that the probe be methylation specific, as described in U.S. Pat. No. 6,331,393, (hereby incorporated by reference in its entirety) also known as the MethylLight™ assay. Variations on the TaqMan™ detection methodology that are also suitable for use with the described invention include the use of dual-probe technology (Lightcycler™) or fluorescent amplification primers (Sunrise™ technology). Both these techniques may be adapted in a manner suitable for use with bisulfite treated DNA, and moreover for methylation analysis within CpG dinucleotides.

[0127] A further suitable method for the use of probe oligonucleotides for the assessment of methylation by analysis of bisulfite treated nucleic acids comprises the use of blocker oligonucleotides. The use of such blocker oligonucleotides has been described by Yu et al., BioTechniques 23:714-720, 1997. Blocking probe oligonucleotides are hybridized to the bisulfite treated nucleic acid concurrently with the PCR primers. PCR amplification of the nucleic acid is terminated at the 5′ position of the blocking probe, such that amplification of a nucleic acid is suppressed where the complementary sequence to the blocking probe is present. The probes may be designed to hybridize to the bisulfite treated nucleic acid in a methylation status specific manner. For example, for detection of methylated nucleic acids within a population of unmethylated nucleic acids, suppression of the amplification of nucleic acids which are unmethylated at the position in question would be carried out by the use of blocking probes comprising a ‘CpG’ at the position in question, as opposed to a ‘CpA.’

[0128] For PCR methods using blocker oligonucleotides, efficient disruption of polymerase-mediated amplification requires that blocker oligonucleotides not be elongated by the polymerase. Preferably, this is achieved through the use of blockers that are 3′-deoxyoligonucleotides, or oligonucleotides derivitized at the 3′ position with other than a “free” hydroxyl group. For example, 3′-O-acetyl oligonucleotides are representative of a preferred class of blocker molecule.

[0129] Additionally, polymerase-mediated decomposition of the blocker oligonucleotides should be precluded. Preferably, such preclusion comprises either use of a polymerase lacking 5′-3′ exonuclease activity, or use of modified blocker oligonucleotides having, for example, thioate bridges at the 5′-terminii thereof that render the blocker molecule nuclease-resistant. Particular applications may not require such 5′ modifications of the blocker. For example, if the blocker- and primer-binding sites overlap, thereby precluding binding of the primer (e.g., with excess blocker), degradation of the blocker oligonucleotide will be substantially precluded. This is because the polymerase will not extend the primer toward, and through (in the 5′-3′ direction) the blocker—a process that normally results in degradation of the hybridized blocker oligonucleotide.

[0130] A particularly preferred blocker/PCR embodiment, for purposes of the present invention and as implemented herein, comprises the use of peptide nucleic acid (PNA) oligomers as blocking oligonucleotides. Such PNA blocker oligomers are ideally suited, because they are neither decomposed nor extended by the polymerase. In a further preferred embodiment of the method, the fifth step of the method comprises the use of template-directed oligonucleotide extension, such as MS-SNuPE as described by Gonzalgo & Jones, Nucleic Acids Res. 25:2529-2531, 1997.

[0131] In yet a further embodiment of the method, the fifth step of the method comprises sequencing and subsequent sequence analysis of the amplificate generated in the third step of the method (Sanger F., et al., Proc Natl Acad Sci USA 74:5463-5467, 1977).

[0132] Additional embodiments of the invention provide a method for the analysis of the methylation status of genomic DNA according to the invention (SEQ ID NO: 1 to SEQ ID NO:71, and complements thereof) without the need for pretreatment.

[0133] In the first step of such additional embodiments, the genomic DNA sample is isolated from tissue or cellular sources. Preferably, such sources include cell lines, histological slides, body fluids, or tissue embedded in paraffin. In the second step, the genomic DNA is extracted. Extraction may be by means that are standard to one skilled in the art, including but not limited to the use of detergent lysates, sonification and vortexing with glass beads. Once the nucleic acids have been extracted, the genomic double-stranded DNA is used in the analysis.

[0134] In a preferred embodiment, the DNA may be cleaved prior to the treatment, and this may be by any means standard in the state of the art, in particular with methylation-sensitive restriction endonucleases.

[0135] In the third step, the DNA is then digested with one or more methylation sensitive restriction enzymes. The digestion is carried out such that hydrolysis of the DNA at the restriction site is informative of the methylation status of a specific CpG dinucleotide.

[0136] In the fourth step, which is optional but a preferred embodiment, the restriction fragments are amplified. This is preferably carried out using a polymerase chain reaction, and said amplificates may carry suitable detectable labels as discussed above, namely fluorophore labels, radionuclides and mass labels.

[0137] In the fifth step the amplificates are detected. The detection may be by any means standard in the art, for example, but not limited to, gel electrophoresis analysis, hybridization analysis, incorporation of detectable tags within the PCR products, DNA array analysis, MALDI or ESI analysis.

[0138] In the final step the of the method the presence, absence or subclass of colon cell proliferative disorder is deduced based upon the methylation state of at least one CpG dinucleotide sequence of SEQ ID NO:1 to SEQ ID NO:71, or an average, or a value reflecting an average methylation state of a plurality of CpG dinucleotide sequences of SEQ ID NO:1 to SEQ ID NO:71.

[0139] Diagnostic and/or Prognostic Assays for Colon Cell Proliferative Disorders

[0140] The present invention enables diagnosis and/or prognosis of events which are disadvantageous to patients or individuals in which important genetic and/or epigenetic parameters within one or more of SEQ ID NO:1 to SEQ ID NO:71 may be used as markers. Said parameters obtained by means of the present invention may be compared to another set of genetic and/or epigenetic parameters, the differences serving as the basis for a diagnosis and/or prognosis of events which are disadvantageous to patients or individuals.

[0141] Specifically, the present invention provides for diagnostic and/or prognostic cancer assays based on measurement of differential methylation of one or more CpG dinucleotide sequences of SEQ ID NO:1 to SEQ ID NO:71, or of subregions thereof that comprise such a CpG dinucleotide sequence. Typically, such assays involve obtaining a tissue sample from a test tissue, performing an assay to measure the methylation status of at least one CpG dinucleotide sequence of SEQ ID NO:1 to SEQ ID NO:71 derived from the tissue sample, relative to a control sample, or a known standard, and making a diagnosis or prognosis based, at least in part, thereon.

[0142] In particular preferred embodiments, inventive oligomers are used to assess the CpG dinucleotide methylation status, such as those based on SEQ ID NO:1 to SEQ ID NO:355, or arrays thereof, as well as in kits based thereon and useful for the diagnosis and/or prognosis of colon cell proliferative disorders.

[0143] Kits

[0144] Moreover, an additional aspect of the present invention is a kit comprising, for example: a bisulfite-containing reagent; a set of primer oligonucleotides containing at least two oligonucleotides whose sequences in each case correspond, are complementary, or hybridize under stringent or highly stringent conditions to a 18-base long segment of the sequences SEQ ID NO:1 to SEQ ID NO:355; oligonucleotides and/or PNA-oligomers; as well as instructions for carrying out and evaluating the described method. In a further preferred embodiment, said kit may further comprise standard reagents for performing a CpG position-specific methylation analysis, wherein said analysis comprises one or more of the following techniques: MS-SNuPE, MSP, MethyLight™, HeavyMethyl™, COBRA, and nucleic acid sequencing. However, a kit along the lines of the present invention can also contain only part of the aforementioned components.

[0145] While the present invention has been described with specificity in accordance with certain of its preferred embodiments, the following example serves only to illustrate the invention and is not intended to limit the invention within the principles and scope of the broadest interpretations and equivalent configurations thereof.

### EXAMPLES

[0146] Pooled genomic DNA from healthy colon, adenomas and colon adenocarcinoma tissue was isolated and analyzed using the discovery methods, AP-PCR and MCA (EXAMPLE 1). These technologies distinguish between methylated and unmethylated CpG sites through the use of methylation sensitive enzymes. In general, whole genomic DNA is first digested to increase manageability, and then further digested with a methylation sensitive enzyme. Methylated fragments are preferentially amplified because cleavage at the unmethylated sites prevents amplification of these products. Differentially methylated fragments identified using these techniques are sequenced (EXAMPLE 2) and compared to the human genome using the BLAST utility in the Ensembl database. The sample set was selected based on the initial aim of the diagnostic problem to be solved. The aim of the study was to enable the identification colon adenocarcinoma and adenomatous polyps in patients, particularly those 50 and older and most preferably by analysis of body fluids. Samples used in the EXAMPLE 1 experiments were divided into three age groups where group A=patients over the age of 65 years, group B=patients ages 50 to 65 and group C=patients younger than 50. Patient samples were also divided depending on the extent of disease. Stage 0 includes normal adjacent tissue (NAT) or no disease, Stage I includes adenomas, Stage 2 includes early carcinoma with no nodal involvement or metastasis (NOM0), and Stage 3 includes advanced disease with nodal involvement and/or metastasis (NIM1). DNA was extracted from snap-frozen patient tissue using Qiagen Genomic tip columns. Up to five DNA samples from each age and stage were pooled and compared as shown in TABLE 1. Multiple comparisons were performed for early and late stage adenocarcinoma for the patients over 65 years of age since this is the group with the highest incidence of colorectal cancer. A single comparison of samples from patients younger than 50 was included to look for overlap of these markers with the other age groups.

TABLE 1
Sample pools used in EXAMPLE 1

| Comparison | Pools |
|---|---|
| A1/A0 | 1 |
| A2/A0 | 3 |
| A3/A0 | 2 |
| B1/B0 | 1 |
| B2/B0 | 1 |
| B3/B0 | 1 |
| C1, 2, 3,/C0 | 1 |
| A1, 2, 3/A0 PBLs | 1 |
| B1, 2, 3/B0 PBLs | 1 |
| C1, 2, 3/C0 PBLs | 1 |

[0147] TABLE 2
Samples used According to EXAMPLE 1
(NAT = normal adjacent tissue;
PBL = Peripheral Blood Lymphocytes)

| Pool | Tissue | Diagnosis | Age | Stage |
|---|---|---|---|---|
| Nat pool a1 | Colon | NAT | A | 0 |
| Nat pool a1 | Colon | NAT | A | 0 |
| Nat pool a1 | Colon | NAT | A | 0 |
| Nat pool a2 | Colon | NAT | A | 0 |
| Nat pool a2 | Colon | NAT | A | 0 |
| Nat pool a2 | Colon | NAT | A | 0 |
| Nat pool a2 | Colon | NAT | A | 0 |
| Nat pool a2 | Colon | NAT | A | 0 |
| Nat pool a2 | Colon | NAT | A | 0 |
| Nat pool a3 | Colon | NAT | A | 0 |
| Nat pool a3 | Colon | NAT | A | 0 |
| Nat pool a3 | Colon | NAT | A | 0 |
| Nat pool a3 | Colon | NAT | A | 0 |
| Nat pool a3 | Colon | NAT | A | 0 |
| Nat pool a3 | Colon | NAT | A | 0 |
| Pool a1 | Colon | Tubular adenoma | A | 1 |
| Pool a1 | Colon | Large tubulovillous adenoma | A | 1 |
| Pool a1 | Colon | Villous adenoma of ascending | A | 1 |
| | | colon | | |
| Pool a1 | Colon | Benign Tubulovillous adenoma | A | 1 |
| Pool a1 | Colon | Tubulovillous adenoma | A | 1 |
| Pool a2 | Colon | Infiltrating moderately | A | 2 |
| | | differentiated adenocarcinoma | | |
| | | T?N0M0 | | |
| Pool a2 | Colon | Adenocarcinoma well | A | 2 |
| | | differentiated, T3 N0 M0, | | |
| | | Stage II | | |
| Pool a2 | Colon | Mucinous adenocarcinoma | A | 2 |
| | | T?N0M0 | | |
| Pool a2 | Colon | Invasive mod. Differ. Gr. 2/3 | A | 2 |
| | | adenocarcinoma T3N0M0, | | |
| | | Stage II | | |
| Pool a2 | Colon | Adenocarcinoma, moderately | A | 2 |
| | | differentiated; cecum, N0 T2 | | |
| Pool a2 | Colon | Invasive mod. Differ., Grade 2/3 | A | 2 |
| | | adenoca of sigmoid | | |
| | | T2N0M0, Stage II | | |
| Pool a3 | Colon | Mucinous adenocarcinoma | A | 3 |
| | | low % tumor, T4N1MX | | |
| Pool a3 | Colon | Adenocarcinoma, moderately | A | 3 |
| | | differentiated; mucinous, | | |
| | | N1 T3 | | |
| Pool a3 | Colon | Invasive mod differentiated | A | 3 |
| | | adenocarcinoma Grade 2, | | |
| | | T2N1M0 | | |
| Pool a3 | Colon | Adenocarcinoma, moderately | A | 3 |
| | | differentiated, N2 T3 | | |
| Pool a3 | Colon | Adenocarcinoma, moderately | A | 3 |
| | | differentiated, N1 T2 | | |
| Pool a3 | Colon | Adenocarcinoma, well | A | 3 |
| | | differentiated, N1 T3 | | |
| Pbl pool a | PBL | Normal | A | PBL |
| Pbl pool a | PBL | Normal | A | PBL |
| Pbl pool a | PBL | Normal | A | PBL |
| Pbl pool a | PBL | Normal | A | PBL |
| Nat pool b2 | Colon | NAT | B | 0 |
| Nat pool b2 | Colon | NAT | B | 0 |
| Nat pool b2 | Colon | NAT | B | 0 |
| Nat pool b2 | Colon | NAT | B | 0 |
| Nat pool b2 | Colon | NAT | B | 0 |
| Nat pool b1 | Colon | NAT | B | 0 |
| Pool b1 | Colon | Adenoma, tubulovillous, | B | 1 |
| | | benign dysplasia | | |
| Pool b2 | Colon | Well-differentiated | B | 2 |
| | | adenocarcinoma, T2N0M0 | | |
| | | Stage I | | |
| Pool b2 | Colon | Adenocarcinoma, moderately | B | 2 |
| | | differentiated; sigmoid, | | |
| | | N0 M0 T3; stage II | | |
| Pool b2 | Colon | Adenocarcinoma, moderately | B | 2 |
| | | differentiated, N0 M0 T3; | | |
| | | stage II | | |
| Pool b2 | Colon | Adenocarcinoma moderately | B | 2 |
| | | differentiated T3N0M0, | | |
| | | Stage II | | |
| Pool b2 | Colon | Adenocarcinoma, well | B | 2 |
| | | differentiated, N0 M0 T3; | | |
| | | stage II | | |
| Pbl pool b | PBL | Normal | B | PBL |
| Pbl pool b | PBL | Normal | B | PBL |
| Pbl pool b | PBL | Normal | B | PBL |
| Pbl pool b | PBL | Normal | B | PBL |
| Pbl pool b | PBL | Normal | B | PBL |
| Nat pool c2 | Colon | NAT | C | 0 |
| Nat pool c2 | Colon | NAT | C | 0 |
| Nat pool c2 | Colon | NAT | C | 0 |
| Nat pool c2 | Colon | NAT | C | 0 |
| Nat pool c2 | Colon | NAT | C | 0 |
| Nat pool c3 | Colon | NAT | C | 0 |
| Nat pool c3 | Colon | NAT | C | 0 |
| Nat pool c3 | Colon | NAT | C | 0 |
| Pool c2 | Colon | adenocarcinoma well | C | 2 |
| | | differentiated, T3 N0 | | |
| | | M0, Stage II | | |
| Pool c2 | Colon | Well differentiated | C | 2 |
| | | adenocarcinoma T3N0M0 | | |
| | | stage II | | |
| Pool c2 | Colon | adenocarcinoma well | C | 2 |
| | | differentiated, T3 N0 | | |
| | | M0, Stage II | | |
| Pool c2 | Colon | Moderately differentiated | C | 2 |
| | | adenocarcinoma, T3N0M0, | | |
| | | Stage II | | |
| Pool c2 | Colon | Adenocarcinoma moderately | C | 2 |
| | | differentiated T3N0M0, Stage II | | |
| Pool c3 | Colon | Adenocarcinoma, stage III, well | C | 3 |
| | | differentiated, sigmoid, T3N1M0 | | |
| Pool c3 | Colon | Adenocarcinoma, mucinous, | C | 3 |
| | | N1 M0 T3; stage III | | |
| Pool c3 | Colon | Adenocarcinoma, mucinous, | C | 3 |
| | | grade 2, T3N1M0, stage III | | |
| Pbl pool c | PBL | Normal | C | PBL |
| Pbl pool c | PBL | Normal | C | PBL |
| Pbl pool c | PBL | Normal | C | PBL |
| Pbl pool c | PBL | Normal | C | PBL |
| Pbl pool c | PBL | Normal | C | PBL |

### Example 1

### (Restriction Enzyme Analysis)

[0148] Identifying one or more primary differentially methylated CpG dinucleotide sequences using a controlled assay suitable for identifying at least one differentially methylated CpG dinucleotide sequences within the entire genome, or a representative fraction thereof.

[0149] All processes were performed on both pooled and/or individual samples, and analysis was carried out using two different Discovery methods; namely, methylated CpG amplification (MCA), and arbitrarily-primed PCR (AP-PCR).

[0150] AP-PCR.

[0151] AP-PCR analysis was performed on sample classes of genomic DNA as follows:

[0152] 1. DNA isolation; genomic DNA was isolated from sample classes using the commercially available Wizzard™ kit;

[0153] 2. Restriction enzyme digestion; each DNA sample was digested with 3 different sets of restriction enzymes for 16 hours at 37° C.: RsaI (recognition site: GTAC); RsaI (recognition site: GTAC) plus HpaII (recognition site: CCGG; sensitive to methylation); and RsaI (recognition site: GTAC ) plus MspI (recognition site: CCGG; insensitive to methylation);

[0154] 3. AP-PCR analysis; each of the restriction digested DNA samples was amplified with the primer sets (SEQ ID NOS:356-379) according to TABLE 1 at a 40° C. annealing temperature, and with [³²P]-dATP.

[0155] 4. Polyacrylamide Gel Electrophoresis; 1.6 μl of each AP-PCR sample was loaded on a 5% Polyacrylamide sequencing-size gel, and electrophoresed for 4 hours at 130 Watts, prior to transfer of the gel to chromatography paper, covering the transferred gel with saran wrap, and drying in a gel dryer for a period of about 1-hour;

[0156] 5. Autoradiographic Film Exposure; film was exposed to dried gels for 20 hours at −80° C., and then developed. Glogos was added to the dried gel and exposure was repeated with new film. The first autorad was retained for records, while the second was used for excising bands; and

[0157] 6. Bands corresponding to differential methylation were visually identified on the gel. Such bands were excised and the DNA therein was isolated and cloned using the Invitrogen TA Cloning Kit.

TABLE 3
Primers used According to the AP-PCR Protocol
Example 1

| | | |
|---|---|---|
| | SEQUENCE | |
| PRIMER | (5′ to 3′) | SEQ ID NO: |

| | | |
|---|---|---|
| GC1 | GGGCCGCGGC | 356 |
| GC2 | CCCCGCGGGG | 357 |
| GC3 | CGCGGGGGCG | 358 |
| GC4 | GCGCGCCGCG | 359 |
| GC5 | GCGGGGCGGC | 360 |
| G1 | GCGCCGACGT | 361 |
| G2 | CGGGACGCGA | 362 |
| G3 | CCGCGATCGC | 363 |
| G4 | TGGCCGCCGA | 364 |
| G5 | TGCGACGCCG | 365 |
| G6 | ATCCCGCCCG | 366 |
| G7 | GCGCATGCGG | 367 |
| G8 | GCGACGTGCG | 368 |
| G9 | GCCGCGNGNG | 369 |
| G10 | GCCCGCGNNG | 370 |
| APBS1 | AGCGGCCGCG | 371 |
| APBS5 | CTCCCACGCG | 372 |
| APBS7 | GAGGTGCGCG | 373 |
| APBS10 | AGGGGACGCG | 374 |
| APBS11 | GAGAGGCGCG | 375 |
| APBS12 | GCCCCCGCGA | 376 |
| APBS13 | CGGGGCGCGA | 377 |
| APBS17 | GGGGACGCGA | 378 |
| APBS18 | ACCCCACCCG | 379 |

[0158] TABLE 4
A Selection of the Results of AP-PCR According to EXAMPLE 1

| | | | | | Tissue | Methylation | Tissue | Methylation |
|---|---|---|---|---|---|---|---|---|
| Experiment | Primer 1 | Primer 2 | Primer 3 | band | Type 1 | state 1 | Type 2 | state 2 |
| colon 4.1 | GC1 | G2 | APBS1 | 1 | colon | hypo | colon | hyper |
| | | | | | nat pool | | pool a1 | |
| | | | | | a1 | | | |
| colon 4.1 | GC4 | G5 | APBS1 | 1 | colon | hypo | colon | hyper |
| | | | | | nat pool | | pool a1 | |
| | | | | | a1 | | | |
| colon 4.2 | GC3 | G6 | APBS7 | 1 | colon | hypo | colon | hyper |
| | | | | | nat pool | | pool a1 | |
| | | | | | a1 | | | |
| colon 4.2 | GC3 | G6 | APBS7 | 2 | colon | hypo | colon | hyper |
| | | | | | nat pool | | pool a1 | |
| | | | | | a1 | | | |
| colon 4.2 | GC4 | G5 | APBS7 | 1 | colon | hypo | colon | hyper |
| | | | | | nat pool | | pool a1 | |
| | | | | | a1 | | | |
| colon 4.2 | GC3 | G1 | APBS10 | 1 | colon | hypo | colon | hyper |
| | | | | | nat pool | | pool a1 | |
| | | | | | a1 | | | |
| colon 4.2 | GC3 | G1 | APBS10 | 2 | colon | hypo | colon | hyper |
| | | | | | nat pool | | pool a1 | |
| | | | | | a1 | | | |
| colon 4.2 | GC4 | G2 | APBS10 | 1 | colon | hyper | colon | hypo |
| | | | | | nat pool | | pool a1 | |
| | | | | | a1 | | | |
| colon 4.5 | GC3 | G5 | APBS13 | 1 | colon | hypo | colon | hyper |
| | | | | | nat pool | | pool a1 | |
| | | | | | a1 | | | |
| colon 4.5 | G3 | G4 | APBS17 | 1 | colon | hypo | colon | hyper |
| | | | | | nat pool | | pool a1 | |
| | | | | | a1 | | | |
| colon 4.5 | G5 | G6 | APBS17 | 1 | colon | hypo | colon | hyper |
| | | | | | nat pool | | pool a1 | |
| | | | | | a1 | | | |
| colon 4.6 | G7 | G8 | APBS13 | 1 | colon | hypo | colon | hyper |
| | | | | | nat pool | | pool a1 | |
| | | | | | a1 | | | |
| colon 4.6 | G8 | G10 | APBS13 | 1 | colon | hypo | colon | hyper |
| | | | | | nat pool | | pool a1 | |
| | | | | | a1 | | | |
| colon 4.6 | G5 | G7 | APBS12 | 1 | colon | hypo | colon | hyper |
| | | | | | nat pool | | pool a1 | |
| | | | | | a1 | | | |
| colon 4.7 | G2 | G4 | APBS12 | 1 | colon | hypo | colon | hyper |
| | | | | | nat pool | | pool a1 | |
| | | | | | a1 | | | |
| colon 4.7 | G1 | G3 | APBS11 | 1 | colon | hypo | colon | hyper |
| | | | | | nat pool | | pool a1 | |
| | | | | | a1 | | | |
| colon 4.7 | G1 | G3 | APBS11 | 2 | colon | hypo | colon | hyper |
| | | | | | nat pool | | pool a1 | |
| | | | | | a1 | | | |
| colon 4.8 | G1 | G8 | APBS10 | 1 | colon | hypo | colon | hyper |
| | | | | | nat pool | | pool a1 | |
| | | | | | a1 | | | |
| colon 4.8 | G5 | G9 | APBS7 | 1 | colon | hyper | colon | hypo |
| | | | | | nat pool | | pool a1 | |
| | | | | | a1 | | | |
| colon 4.8 | G2 | G6 | APBS5 | 1 | colon | hypo | colon | hyper |
| | | | | | nat pool | | pool a1 | |
| | | | | | a1 | | | |
| colon 4.8 | G1 | G5 | APBS5 | 1 | colon | hypo | colon | hyper |
| | | | | | nat pool | | pool a1 | |
| | | | | | a1 | | | |
| colon 4.8 | G4 | G10 | APBS5 | 1 | colon | hypo | colon | hyper |
| | | | | | nat pool | | pool a1 | |
| | | | | | a1 | | | |
| colon 4.9 | G1 | G7 | APBS1 | 1 | colon | hypo | colon | hyper |
| | | | | | nat pool | | pool a1 | |
| | | | | | a1 | | | |
| colon 4.9 | APBS10 | APBS13 | APBS17 | 1 | colon | hypo | colon | hyper |
| | | | | | nat pool | | pool a1 | |
| | | | | | a1 | | | |

[0159] MCA.

[0160] MCA was used to identify hypermethylated sequences in one population of genomic DNA as compared to a second population by selectively eliminating sequences that do not contain the hypermethylated regions. This was accomplished, as described in detail herein above, by digestion of genomic DNA with a methylation-sensitive enzyme that cleaves un-methylated restriction sites to leave blunt ends, followed by cleavage with an isoschizomer that is methylation insensitive and leaves sticky ends. This is followed by ligation of adaptors, amplicon generation and subtractive hybridization of the tester population with the driver population.

[0161] In the initial restriction digestion reactions, 5 μg of each genomic DNA pool was digested with SmaI in a 100 μL reaction overnight at 25° C. in NEB buffer 4+BSA, and 100 units of enzyme (10 μL). The pools were then further digested with Xma I (2 μL=100 U), 6 hours at 37° C.

[0162] 500 ng of the cleaned-up, digested material was ligated to the adapter-primer RXMA24+RXMA12 (Sequence: RXMA24: AGCACTCTCCAGCCTCTCACCGAC (SEQ ID NO: 380); RXMA12: CCGGGTCGGTGA (SEQ ID NO:381). These were hybridized to create the adapter by heating together at 70° C. and slowly cooling to room temperature (RT) in a 30 μL reaction overnight at 16° C., with 400 U (1 μL) of T4 ligase enzyme.

[0163] 3 μL of the ligation mix for both tester and driver populations was used in each initial PCR to generate the starting amplicons. Two PCR reactions were run for the tester, and 8 for the driver. Reactions were 100 μL, with 1 μL of 100 μM primer RXMA24 (SEQ ID NO:380), 10 μL PCR buffer,1.2 μL 25 mM dNTPs, 68.8 μl water, 1 μL titanium Taq, 2 μL DMSO, and 10 μL 5 M Betaine. PCR comprised an initial step at 95° C. for 1 minute, followed by 25 cycles at 95° C. for 1 minute, followed by 72° C. for 3 minutes, and a final extension at 72° C. for 10 minutes.

[0164] The tester amplicons were then digested with XmaI as described above, yielding overhanging ends, and the driver amplicons were digested with SmaI as above, yielding blunt end fragments.

[0165] A new set of adapter primers (hybridized as described for the above RXMA primers) JXMA24+JXMA12 (Sequence: JXMA24: ACCGACGTCGACTATCCATGAACC (SEQ ID NO:382); JXMA12: CCGGGGTTCATG (SEQ ID NO:383) was ligated to the Tester only (using the same conditions as described above for the RXMA primers).

[0166] Five μg of digested tester and 40 μg of digested driver amplicons were hybridized in a solution containing 4 μL EE (30 mM EPPS, 3 mM EDTA) and 1 μL of 5 M NaCl at 67° C. for 20 hours. A selective PCR reaction was done using primer JXMA24 (SEQ ID NO:382). The PCR amplification steps were as follows: an initial fill-in step at 72° C. for 5 minutes, followed by 95° C. for 1 minute, and 72° C. for 3 minutes, for 10 cycles. Subsequently, 10 μL of Mung Bean nuclease buffer plus 10 μL Mung Bean Nuclease (10 U) was added and incubated at 30° C. for 30 minutes. This reaction was cleaned up and used as a template for 25 more cycles of PCR using JXMA24 primer (SEQ ID NO:382) and the same conditions.

[0167] The resulting PCR product (tester) was digested again using XmaI, as described above, and a third adapter, NXMA24 (AGGCAACTGTGCTATCCGAGTGAC; SEQ ID NO:384)+NXMA12 (CCGGGTCACTCG; SEQ ID NO: 385) was ligated. The tester (500 ng) was hybridized a second time to the original digested driver (40 μg) in 4 μL EE (30 mM EPPS, 3 mM EDTA) and 1 μL 5 M NaCl at 67° C. for 20 hours. Selective PCR was performed using NXMA24 primer (SEQ ID NO:) as follows: an initial fill-in step at 72° C. for 5 minutes, followed by 95° C. for 1 minute, and 72° C. for 3 minutes, for 10 cycles. Subsequently, 10 μL of Mung Bean nuclease buffer plus 10 μL Mung Bean Nuclease (10 U) was added and incubated at 30° C. for 30 minutes. This reaction was cleaned up and used as a template for 25 more cycles of PCR using NXMA24 primer and the same conditions.

[0168] The resulting PCR product (1.8 μg) was digested with XmaI (in 50 μL total volume, NEB buffer 4+BSA, and 2 μL=100 U XmaI, 6 hours at 37° C.) and ligated into the vector pBC Sk—predigested with XmaI and phosphatased (675 ng). Five (5) μL of a 30 μL ligation was used to transform chemically competent TOP10™ cells according to the manufacturer's instructions. The transformations were plated onto LB/XGal/IPTG/CAM plates. Selected insert colonies were sequenced according to Example 2.

[0169] Scoring of Unique Sequence Embodiments Comprising One or More Differentially Methylated CpG Dinucleotides.

[0170] The Discovery methods and comparisons of EXAMPLE 1 resulted in the identification of 712 unique marker sequences. A subset of these sequences were eliminated, because of high (>50%) repeat sequence content. The 509 remaining sequences were further selected according to the following scoring criteria and procedure shown in TABLE 4:

TABLE 4
Scoring Criteria, and ‘Points’ Allotted in view of Same

| | Allotted points |
|---|---|
| Scoring Criterion | if criterion met |
| Appearance (i.e., differentially methylated) | +1 |
| using multiple methods | |
| Appearance in multiple pools | +1 |
| Located within (or comprising) a CpG island | +1 |
| Located within the promoter region of a gene | +1 |
| Near or within predicted or known gene | +1 |
| Known to be associated with disease | +1 |
| Class of gene (transcription factor, growth | +1 |
| factor, etc.) | |
| Repetitive element (negative score) | −8 |

[0171] Under this scoring scheme, a MeST sequence receives a point (+1) for satisfaction of each of the above criteria, and receives a score of minus eight (−8) for having repetitive sequence content greater than 50%. The highest score possible is 7, the lowest is (−)8. Scores are automatically generated using a proprietary database. The above-mentioned 509 MeST sequences were further analyzed using the above scoring criteria, along with manual review of the sequences, resulting in identification of a preferred set of 266 unique sequences.

[0172] Primers were designed for these 266 sequences for the purpose of bisulfite sequencing. Forty-nine (49) of the sequences were not sequenced for various technical reasons, or changes in scoring according to the above criteria, based on additional information (e.g., updates of the Ensembl database).

### Example 2

### (Bisulfite Sequencing)

[0173] For bisulfite sequencing amplification primers were designed to cover each individual sequence when possible or part of the 1000 bp flanking regions surrounding the position. Samples used in Example 1 were utilized for amplicon production in this phase of the study. Ten to fifteen samples each of DNA from normal adjacent colon, colon adenocarcinoma, and normal peripheral blood lymphocytes (PBLs) were treated with sodium bisulfite and sequenced. Initially, sequence data was obtained using MegaBace technology and later sequences were derived using an ABI 3700 device. Traces obtained from sequencing were normalized, and percentage methylation values calculated using an ESME™ analysis program (Epigenomics, A G, Berlin).

[0174] Results of Bisulfite Sequencing.

[0175] The following properties were noted (screened for):

[0176] (1) Bisulfite sequencing indicates differential methylation of a CpG site between selected classes of samples (Fisher score);

[0177] (2) Co-methylation is observed;

[0178] (3) If only one site has fisher score >1, are there additional sites surrounding with fisher score >0.5?; and

[0179] (4) Are there trends in the pattern (e.g., blocks of blue (black) vs. yellow (light grey)), but not necessarily high Fisher score.

[0180] FIGS. 1 though 3 show representative ‘ranked’ matrices produced from bisulfite sequencing data analyzed by means of the proprietary ESME™ program (Epigenetics, A G, Berlin). The overall matrix, in each case, represents the sequencing data for one fragment. Each row of the matrix is a single CpG site within the fragment and each column is an individual DNA sample (sample designations are shown along the X-axis). The bar on the left represents the percent of methylation, with the degree of methylation represented by the darkness of each position within the column from black (Blue) representing 100% methylation to light grey (yellow) representing 0% methylation. Colon cancer samples are shown to the left of the vertical black line, and healthy colon samples are to the right of the vertical black line. In FIG. 3, peripheral blood lymphocytes (PBL) are grouped to the far right of the matrix (i.e., to the right of the second vertical black line).

[0181] FIG. 1 represents the sequencing data for a fragment of SEQ ID NO:46 according to EXAMPLE 2 herein below. Each row of the matrix represents a single CpG dinucleotide site within the fragment and each column is an individual DNA sample (sample designations are listed on the X-axis). The vertical calibration bar on the left correlates the intensity of shading or color with the percent of methylation; with the degree of methylation represented by the darkness of each position within the column from black (or blue) representing 100% methylation to light grey (or yellow) representing 0% methylation. Colon cancer samples are to the left of the central vertical black line and healthy colon samples are to the right of the vertical black line. The Figure shows a representative example of a genomic fragment (SEQ ID NO:46 ) exhibiting mosaic patterns of methylation in normal samples, and extensive co-methylation in cancer, positions below the horizontal line (denoted within the limits of the left curly bracket) were considered to be particularly informative.

[0182] FIG. 2 represents the sequencing data for a fragment of SEQ ID NO:14 according to EXAMPLE 2 herein below. Each row of the matrix represents a single CpG site within the fragment and each column is an individual DNA sample (sample designations are listed on the X-axis). The vertical calibration bar on the left correlates the intensity of shading or color with the percent of methylation; with the degree of methylation represented by the darkness of each position within the column from black (or blue) representing 100% methylation to light grey (or yellow) representing 0% methylation. Colon cancer samples are to the left of the central vertical black line and healthy colon samples are to the right of the central vertical black line. The Figure shows another representative example of a genomic fragment (SEQ ID NO:14) comprising a block of consecutive CpG positions exhibiting differential methylation between cancer (hypermethylated) and normal colon tissue (hypomethylated), denoted by the left and right box frames, respectively.

[0183] FIG. 3 represents the sequencing data for a fragment of SEQ ID NO:69 according to EXAMPLE 2 herein below. Each row of the matrix represents a single CpG site within the fragment and each column is an individual DNA sample (sample designations are listed on the X-axis). The vertical calibration bar on the left correlates the intensity of shading or color with the percent of methylation; with the degree of methylation represented by the darkness of each position within the column from black (or blue) representing 100% methylation to light grey (or yellow) representing 0% methylation. Colon cancer samples are to the left of the left vertical black line, healthy colon samples are grouped between the left and right black lines, and peripheral blood lymphocytes (PBL) are grouped to the right of the right black vertical line. The Figure shows a comparison of the methylation patterns between colon tissue (both carcinoma in the left block, and healthy in the central block) and peripheral blood lymphocytes (right block). Colon tissues exhibit hypermethylation in the subject representative fragment (SEQ ID NO:69) as compared to peripheral blood lymphocytes.

We claim:

1. A method for detecting, or detecting and distinguishing between or among colorectal cell proliferative disorders, comprising contacting genomic DNA of a biological sample obtained from the subject with at least one reagent, or series of reagents that distinguishes between methylated and non-methylated CpG dinucleotides within a target sequence of the genomic DNA, wherein the target sequence comprises a sequence of at least contiguous nucleotides of a sequence selected from the group consisting of SEQ ID NOS:1-70, and SEQ ID NO:71.

2. A method according to claim 1, wherein said colorectal cell proliferative disorders are selected from the group consisting of colorectal carcinoma, colon adenomas, and colon polyps.

3. The method according to claim 1, wherein the biological sample obtained from the subject is selected from the group consisting of histological slides, biopsies, paraffin-embedded tissue, bodily fluids, stool, blood, serum, plasma and combinations thereof.

4. A method according to claim 1, comprising:
a) obtaining a biological sample containing genomic DNA;
b) extracting, or otherwise isolating the genomic DNA;
c) digesting the genomic DNA of b) comprising at least one CpG dinucleotide of a sequence selected from the group consisting of SEQ ID NOS:1-70, and SEQ ID NO:71, with one or more methylation sensitive restriction enzymes;
d) detecting the DNA fragments generated in the digest of c);
e) determining, based at least in part on the presence or absence of, or on a property of said fragments, the methylation state of at least one CpG dinucleotide sequence of SEQ ID NO:1 to SEQ ID NO:71, or an average, or a value reflecting an average methylation state of a plurality of CpG dinucleotide sequences of SEQ ID NO:1 to SEQ ID NO:71 , whereby at least one of detecting, or detecting and distinguishing between or among colorectal cell proliferative disorders is, at least in part, enabled.

5. A method according to claim 4, wherein the DNA digest is amplified prior to d).

6. A method according to claim 1, comprising:
a) obtaining, from a subject, a biological sample having subject genomic DNA;
b) treating the genomic DNA, or a fragment thereof, with one or more reagents to convert 5-position unmethylated cytosine bases to uracil or to another base that is detectably dissimilar to cytosine in terms of hybridization properties;
c) contacting the treated genomic DNA, or the treated fragment thereof, with an amplification enzyme and at least two primers comprising, in each case, a contiguous sequence at least 18 nucleotides in length that is complementary to, or hybridizes under moderately stringent or stringent conditions to a sequence selected from the group consisting of SEQ ID NOS:72-355, and complements thereof, wherein the treated DNA or a fragment thereof is either amplified to produce one or more amplificates, or is not amplified; and
d) determining, based on the presence or absence of, or on a property of said amplificate, the methylation state of at least one CpG dinucleotide of a sequence selected from the group consisting of SEQ ID NOS: 1-70, and SEQ ID NO:71, or an average, or a value reflecting an average methylation state of a plurality of said CpG dinucleotide sequences, whereby at least one of detecting, or detecting and distinguishing between or among colorectal cell proliferative disorders is, at least in part, enabled.

7. The method of claim 6, wherein in b) treating the genomic DNA, or the fragment thereof, comprises use of a solution selected from the group consisting of bisulfite, hydrogen sulfite, disulfite, and combinations thereof.

8. The method of claim 6, wherein treating in b) comprises at least one of treatment subsequent to embedding the DNA in agarose, treating in the presence of a DNA denaturing reagent, or treating in the presence of a radical trap reagent.

9. The method of any one of claims 5 or 6, wherein contacting or amplifying comprises use of at least one method selected from the group consisting of: use of a heat-resistant DNA polymerase as the amplification enzyme; use of a polymerase chain reaction (PCR); generation of a amplificate nucleic acid molecule carrying a detectable labels; and combinations thereof.

10. The method of claim 9, wherein the detectable amplificate label is selected from the label group consisting of: fluorescent labels; radionuclides or radiolabels; amplificate mass labels detectable in a mass spectrometer; detachable amplificate fragment mass labels detectable in a mass spectrometer; amplificate, and detachable amplificate fragment mass labels having a single-positive or single-negative net charge detectable in a mass spectrometer; and combinations thereof.

11. A nucleic acid comprising a sequence of at least 18 contiguous nucleotides of a treated genomic DNA sequence selected from the group consisting of SEQ ID NOS:72-355, and sequences complementary thereto, wherein the contiguous sequence comprises at least one CpG, TpA, or CpA dinucleotide, and wherein the treatment is suitable to convert at least one unmethylated cytosine base of the genomic DNA sequence initially to uracil or another base that is detectably dissimilar to cytosine in terms of hybridization.

12. An oligomer or peptide nucleic acid (PNA)-oligomer, said oligomer comprising in each case a sequence of at least 9 contiguous nucleotides that is complementary to, or hybridizes under moderately stringent or stringent conditions to a treated genomic DNA sequence selected from the group consisting of SEQ ID NOS:72-355, and sequences complementary thereto.

13. The oligomer of claim 12, wherein the contiguous sequence includes at least one CpG, TpG or CpA dinucleotide.

14. The oligomer of claim 13, wherein the cytosine of the CpG, the thymine of the TpG, or the adenosine of the CpA dinucleotide is located at about the middle third of the oligomer.

15. A set of oligomers, comprising at least two oligomers according, in each case, to any one of claims 12 to 14.

16. The set of oligomers of claim 15, comprising one or more oligomers suitable for use as primer oligonucleotides for the amplification of a DNA sequence selected from the group consisting of SEQ ID NOS:72-355, and sequences complementary thereto.

17. The set of oligomers of claim 15, wherein at least one oligomer is bound to a solid phase.

18. Use of the set of oligomers according to any one of claims 15 through 17, wherein at least one oligomer can be used as a probe for detecting at least one of the cytosine methylation state, or single nucleotide polymorphisms (SNPs) within a sequence selected from the group consisting of SEQ ID NOS:1-71, and sequences complementary thereto.

19. An oligomer array, according to claim 17.

20. The array of claim 19, wherein the oligomers or peptide nucleic acid (PNA)-oligomers are arranged on a planar solid phase in the form of a rectangular or hexagonal lattice, or in a form substantially so.

21. The array of any one of claims 19 or 20, wherein the solid phase comprises a material selected from the group consisting of silicon, glass, polystyrene, aluminium, steel, iron, copper, nickel, silver, gold, and combinations thereof.

22. A kit for detecting, or for detecting and distinguishing between or among colorectal cell proliferative disorders, comprising:
i) at lease one of a bisulfite reagent or a methylation-sensitive restriction enzyme;
ii) at least one nucleic acid molecule or peptide nucleic acid molecule comprising, in each case, a contiguous sequence of at least 9 nucleotides that is complementary to, or hybridizes under moderately stringent or stringent conditions to a sequence selected from the group consisting of SEQ ID NOS:1-355, and complements thereof.

23. Use of a nucleic acid according to any one of claims 11 or 25, of an oligomer or PNA-oligomer according to any one of claims 12 through 14, of a kit according to claim 22, of an array according to any one of claims 19 through 21, of a set of oligonucleotides according to any one of claims 15 through 17, or of a method according to any one of claims 1 through 10, for classifying, distinguishing between or among, diagnosing or determining the predisposition for colorectal cell proliferative disorders.

24. Use of a nucleic acid according to any one of claims 11 or 25, of an oligomer or PNA-oligomer according to any one of the claims 15 through 17, of a kit according to claim 22, of an array according to any one of the claims 19 through 21, of a set of oligonucleotides according to one of claims 15 through 17, or of a method according to any one of claims 1 through 10, for the therapy of colorectal cell proliferative disorders.

25. An isolated treated nucleic acid derived from a genomic DNA sequence selected from the group consisting of SEQ ID NOS:1-71, and sequences complementary thereto, wherein the treatment is suitable to convert at least one unmethylated cytosine base of the genomic DNA sequence to uracil or to another base that is detectably dissimilar to cytosine in terms of hybridization.

The application's sequence listing, which the Patent Office published only in electronic form, follows.

SEQUENCE LISTING (385 sequences)

SEQ ID NO: 1 - DNA, 2280 bp, Homo Sapiens
accagcacagaattgctaccataggatcgcagcctaagcactagagtgacattaattggtcatgcttaactgcctcaaaatcattttttaaataattacactgatactataatagaaatcatgggtacttattttacattcagatggaaggcattattggatatgtattaaaaaaaagaccccctgaaaaaaataaaataaaataaaacatcaccatcaaaataaaagaacccaaaacaacccctaaaaacttccctcaacaaaatacattgttaactcataaaatggactgatgactagccatgcaaatgtcctaaataaaacctttacatttttttcacagttaacttatgctctgaactgcctaccgatcacaaataatggcgaaatggcactttctgattatactgtattttgtttatagaaagtttgatacgatggaacttatcaggtaagagggtgggtgctgtgaacgagatgccgtctccagtcgcgggggcgggcagagtccctggagcgcgtggattccatgcgagccatgcagcactttttgttttttgtcagaagtcaaagttacttatttacaatacattcatgccttcgtgcaactgcccatccctgcgtagccaacagggagccatcacggggctaatccacaggggaaaaatagatatctatctctctatatagatgtggatatatgtatatatgtatagaaccgcggcatccaaccccacaggccccggggccgagggcgagggcactgtcagttcttccagcagggtcgtgctgggctttctgtcaaaaggggctctcagcaaagagcgagctggctgcgctctcccagctctccacagtctgctctttgtttcaaggagggagctaagtaaggggtcaggccctttcggttgtgcgagctcacagttatttatctacttatgcccatccaggctgatggcgcggggatttgggtacacgcccctccagcccccggggtgcctgcggtggggaaggatgtatcgccttccctctgccctcccctattggggttggggtcttagtctgagagcgagtgagagccacagtcatacactctgtgggccccatctgcgttgtaaggcccattgtgccagtaggaagagtcacagactgtctgtagggaattaatctcggacgcggaggagttggcatctcgtctcttggaccgctttcggttcctcaggataaacacgagcatgcccaccacggtgaaggcggaggtgacaaacaccagcagcagtcccgggaccaacaccgagatggacaccctgctggtgtctaggtaggagttggagtgcgtcccggtctccgccaacccagtgctgtttttactgtgcgaagttaacgtgggcgagatcctagcgtacagctgagggcagatctcgtcattggagaggagcatgaaatcctttctaaagaagttcaccggcgtctcacacttgaggtcgctcatcagcacttcggaacccaagcgttctgcccactgcttgaaaggcacaattgtgcaggagcactcccaggggtttccgtggaggtctatctggatgatggaggttaactggtccagcacccctgccaccgggaggtacatgaagtaattgttgtgcaggctgagtttagagagcgagaccccagcgaacacgtccacaggcagggacctcagcaggttgttgttgagaatgaggatcctcagtttgggcatggcattgaaagtgcccgggaggatgagctggatagcgttgtactccacgttcaggtactctaggttttgcagccccgcgaatttctcccgggacagcgtgtccaggtaattgctatccatgtatagccacctgaggtccaaaaggttcttgaaagtgttgttctctacagtagcgatgttattgttgcccagatccaacagaatgaggttcttgtaatccacaaagtgcgattttcggatgctgtggatcttgttatctcgtaggaaaagctcctgcacgttagagagcttgggcttcaaatcagccaagctgctcacgttcctgttgttgcagttcatctttaaacccgaccctgggatgtggtcgcagctgcagcccccagggcagggtaaactgttagctaagggtttgttcctggagctacccgtcgctatcgctgctgtgggtctgattttgatctgccagttgcctgggatctttgtacctccgtttggagcagaccctggtgtggcatgatcctcttgcccatttgtcttga

SEQ ID NO: 2 - DNA, 2345 bp, Homo Sapiens
gcgcccggccgtcacttttcttcaatctcactggtgctcgcgggctgaagggtcaggacggactagaggcgagcaatcccggtggcaccaggcattccccgacctgcccgggtcgccagctgcacggaccctgggcagatgcgcgcagcggctgcggcacagggcggggagcggctgctcggccccatcctaaggcagcagaatgcccagagctggtccctggctccaggcgcaggccgagtagcagctgggcgggcagcggcgtcgggcaggcccttccagccgggctgacaggccgctctgacccagccatcagactccgcttgcgtcctggcagcgcggaccctagggcaacttcgctgcagtggccaagccgggggcggaactggcccatacccctgaaccgagcaagcctaggagcaggtgcgccggcggcgctgtgaagcggcactcatgacaggcaggctgggcgccgccaccccgaaacctccgagggaggaccagccagcccaggttggcgctggagctgcagcgccacctgcaggccaagaagtctttttctgggaggctggagctgcagcgccacctgcaggccaaggagtctttttctgggaggctggagctgcagcgcgacgtgcaggccaaggagtctttttctgggaggctggagctgcagttgcagtgaagtcacaggttccgtgacgtcacaggtgggcaggcgcactagtctgtaacggattggcttggccttacccgcgaggctttgcagtggctgcttggcttggcagtggtcgcttggcttggcgtggcagtgatcgcttggcttggcatttctggcttagcggtcctcctttcgcagattggaaaccgcgggctatcctgctgggaggttgtggccgaggcagtagctcgctactgatggtctcctggggtggagaaaagcggggaggggctgaggggtctccgaagccggcagtctacgccacgaggaaaaccggtagcgtcaggagccaggaggaccagtggtacttgggctacccgggggaccagtggtcctcgggcttctcctacagctggtggaaaaacagcgtcggcagcgagagcaagcacggtgagggcgccttagaccagccccagcacgatgtccgcctggaagatcttggcgagctccacagagctgcccggtcgggcgacgtccctggggtggagcacgtcttggttcctggagacactggcgtggacaagagggataggaagaagaggtaatggccaggcgaaggatgcgggcgcgccgtcctgtcggggacactggctttctggtgcccgcaggccccacggcacccgggatggggaaacgtcagaggggtcaggggcccaggcctcttagtgagacgggatcaaatataaaggattattactattgcaaaagtgttggtctactttacaggagttttctttaaaaatattgcacttcccaactgtgtttatccattttctcaatttattcatcaaacataagggccgggcgcggtggctcacgcctgtaataccagcactttgggaggccgaggcgggcggatcacgaggtcaggagatcgagaccacggtgaaaccccgtctctactaaaaatacaaaaaattagccgggcgcagtggcgggcgcctgtagtcccagctactcgggaggctgaggcaggagaatggcgtgaacccagaaggcggagcttgcagtgagcggagatcgcgccacagcactcccgcctgggcgacagaacgagactccgtctcaaaaaaaaaaaaaaaaaaacataaactgaatacctattatacagcagacatattctactgtcgctcaggttccttccatccttaagaacttcatgttggccgggctcggtggctcatgcctgtaatcccagcactttgggaggccgaggagggcagatcacgaggtcagaagttcgagaccagcctgaccgacatggtgaaaccccgcatgttatgcttttgtctcagcctagacttagctaaaaccttcatgacaaattatcctttaggccctcggggttcagttcaaataatgttgcagaaagagatgagtttccttttctcattgctaccagatctgtatgctgaggacccttttcttagatcgtggaatgtcccatattatcctttcccagatttgtggcaggaagccatcaccagaattctgagtctcaagcatgttagttggatttaacagagctaagtctcatccatgactcatgaatatccatgtataaaatgagagctttggcagggtgcagtggctcatgcctgtaatcccagcaatttgggaggct

SEQ ID NO: 3 - DNA, 2605 bp, Homo Sapiens
gggtgccgcagctcgggtgcagagggaaaaaaggacccatagacttgtggctcgcgtcgcgcgcgcacgctgcgccagggccccaggctggcgcgcactccctctctggctcctccagtccgattgctcctgcccccaccttacaggtctgggatgtacctttccatctgttgctgctttcttctatgggcccctgccctcactctcaagaacctcaactactccgtgccggaggagcaaggggccggcacggtgatcgggaacatcggcagggatgctcgactgcagcctgggcttccgcctgcagagcgcggcggcggagggcgcagcaagtcgggtagctaccgggtgctggagaactccgcaccgcacctgctggacgtggacgcagacagcgggctcctctacaccaagcagcgcatcgaccgcgagtccctgtgccgccacaatgccaagtgccagctgtccctcgaggtgttcgccaacgacaaggagatctgcatgatcaaggtagagatccaggacatcaacgacaacgcgccctccttctcctcggaccagatcgaaatggacatctcggagaacgctgctccgggcacccgcttccccctcaccagcgcacatgaccccgacgccggcgagaatgggctccgcacctacctgctcacgcgcgacgatcacggcctctttggactggacgttaagtcccgcggcgacggcaccaagttcccagaactggtcatccagaaggctctggaccgcgagcaacagaatcaccatacgctcgtgctgactgccctggacggtggcgagcctccacgttccgccaccgtacagatcaacgtgaaggtgattgactccaacgacaacagcccggtcttcgaggcgccatcctacttggtggaactgcccgagaacgctccgctgggtacagtggtcatcgatctgaacgccaccgacgccgatgaaggtcccaatggtgaagtgctctactctttcagcagctacgtgcctgaccgcgtgcgggagctcttctccatcgaccccaagaccggcctaatccgtgtgaagggcaatctggactatgaggaaaacgggatgctggagattgacgtgcaggcccgagacctggggcctaaccctatcccagcccactgcaaagtcacggtcaagctcatcgaccgcaacgacaatgcgccgtccatcggtttcgtctccgtgcgccagggggcgctgagcgaggccgcccctcccggcaccgtcatcgccctggtgcgggtcactgaccgggactctggcaagaacggacagctgcagtgtcgggtcctaggcggaggagggacgggcggcggcgggggcctgggcgggcccgggggttccgtccccttcaagcttgaggagaactacgacaacttctacacggtggtgactgaccgcccgctggaccgcgagacacaagacgagtacaacgtgaccatcgtggcgcgggacgggggctctcctcccctcaactccaccaagtcgttcgcgatcaagattctagacgagaacgacaacccgcctcggttcaccaaagggctctacgtgcttcaggtgcacgagaacaacatcccgggagagtacctgggctctgtgctcgcccaggatcccgacctgggccagaacggcaccgtatcctactctatcctgccctcgcacatcggcgacgtgtctatctacacctatgtgtctgtgaatcccacgaacggggccatctacgccctgcgctcctttaacttcgagcagaccaaggcttttgagttcaaggtgcttgctaaggactcgggggcgcccgcgcacttggagagcaacgccacggtgagggtgacagtgctagacgtgaatgacaacgcgccagtgatcgtgctccccacgctgcagaacgacaccgcggagctgcaggtgccgcgcaacgctggcctgggctatctggtgagcactgtgcgcgccctagacagcgacttcggcgagagcgggcgtctcacctacgagatcgtggacggcaacgacgaccacctgtttgagatcgacccgtccagcggcgagatccgcacgctgcaccctttctgggaggacgtgacgcccgtggtggagctggtggtgaaggtgaccgaccacggcaagcctaccctgtccgcagtggccaagctcatcatccgctcggtgagcggatcccttcccgagggggtaccacgggtgaatggcgagcagcaccactgggacatgtcgctgccgctcatcgtgactctgagcactatctccatcatcctcctagcggccatgatcaccatcgccgtcaagtgcaagcgcgagaacaaggagatccgcacttacaactgccgcatcgccgagtacagccacccgcagctgggtgggggcaagggcaagaagaagaagatcaacaaaaatgatatcatgctggtgcagagcgaagtggaggagaggaacgccatgaacgtcatgaacgtggtgagcagcccctccctggccacctcccccatgtacttcgactaccagacccgcctgcccctcagctcgccccggtcggaggtgatgtatctcaaac

SEQ ID NO: 4 - DNA, 2477 bp, Homo Sapiens
tggcacagacatggcccttaaagccaaaaaccatgatggagtgaaggacagctgtgctcagacctgcgtcctgtcctctggaggctgctgtggttctggggatgagtcggaggtgggcaggcagcggtctccggggcctgcagcagggaggccaccacctgcacagcagaacacagcaccattccacagggagcatcccggggcgggcagcaactctggaggcacccccgggaaggagccaggcatgggggaggcggaggcgaccccagaagcagaggagccgctggggagccacggccttctgggtgtggagctgtggaggatgagtgccacccctcccttccgggccttctactctgtagggatccctacgtccaggaccatttgattgtcaaggtctcggcaccctcgtcaggtcagctgggggccaaggcccctaactccgaggactggggccgccaacatgggcagcagcacaggaggccgagaggaggtccacaagggctgcacttccttcctggctgcagtccaccccccagagcagggcgggcgtggagccactctcaccagtattgttggccttgagggcctggtgggcagtgccgcctggtgtgggggacagctcctgagcaggctgccgcattcctggcactctggtctccctgggattctcaggtggcccacgctcggcagtgctcgccttctgggctctcagggctcgtttctgttgcagctcctgcagtgggagcatcgctgagcactgtccctgggagaggacgaccccaggctccacagccaagctgccctgaggctaagtgtcccggggcccagggagccccagcagcagccccgcacggtcaggcctgggccacggtgctgctcagtggtccctgcgcggtcagcacctgaatggctgctcgcctggcttggcgtgccttctcctcccgggccttcctcctggctgcctctttctgctggtgcaggtccaagagggtcccctcgcctgaccgctgccgctgctcctgccaaagaagccggtgccatgtggcgtttacatctggaagacggaatccagacccagaccagaggtttccccacaacgccctggagtcccctagagttcgtggaatctcagggccagcagggaaagtgaaaccccaccaggaccttgaacctgccatttctctgctctacagaggatgagccctacgtcgcaggtggccaacagttctggcgtgggggagacagctctgcccccacagaacgtcctcctgagactctccagcctgggatggacccagcaggcgtttcctgacacccaggccctgaggaccgccagtgaggaccaccctgactgtccgcggggacccagggtcaagaaggatgctgcacccagagacggggcccacgagcaatcctaggctttgattccacctgtcccagaaactcaaacccctgggattctgggccagaccccccgggggagcatggagtgactgagacgcccacactgacctcccgcttggcctgaagcaagtgctccaggcgggcagctcctgctccgcgccgctgcacctggtgccggtaccagcgctggatggtgacagtggcctggttcacctggtggataaacctgcccggagagcaggactcagggccaagacaggaccagcgccccggcaggacccagctggctgctggtggaaggtcgagccggggaagagagaagccggcggctgcactcaagtagcccttttcacaaggcaggaccagcccacctggaccattttcacatggcaggaccagccgcctggaccagctccactaaaacccaaaaccttcttcctgggaaggtgcccaggggagaggaaacgcctacccacgcaggcctgtgtggccttatttacaattgccaggaagtgggaagagttcaaatgcccatgacctggctacagcgtgaatactggatggcgggaccctacccacaggcaacaggcccgggactcaggccagtgcagaccacaggccgtggctccacagagagggtggtcggaacaggcagggctatgagggaacagactggtggctgctggcatctgggcggggaaggagctcgagggaagcctggtggtgctgggccgtttccttatcttggtctgctgtgtccacagacagcactatacaccctggtggaatctcatggaactgcacacttacaatgggcaccttctattgtatacaaattatactaagtaaaactgattaagcaaaaaaaaaaatgcttcaccttggctctcgggaccatgtgtggattctctcagcaaaggcactaacagagaacccagaacgtgtgagccctagctcgggagcagtctgccccgggcagaactggggggcttcaaggggttgcgggcttctggtcccccttccctcgtgccacccaccgcgtctacaggcctggtctccctagccctaac

SEQ ID NO: 5 - DNA, 2291 bp, Homo Sapiens
gttccaattttagtatatgtttgctgctgaagcaagttttgtttgttttagactgagtcttgctctgtcacccaggctggagtgcagtggcgtgatctcggctcactgcaagctccgcctcctgggttcatgccattctcctgccttagcctcctgagtagctgggactacaggcgcccaccaccacgcccggctatttttttttgtattttttagtagtgacggggtttcaccgtgttagccaggatgctctcaatcacctgacctcgtgatccgcccaccttaggctcccaaattgctgggattacaggcatgagccactgcaccctgccaaagctctcattttatacatggatattcatgagtcatggatgagacttagctctgttaaatccaactaacatacttgagactcagaattctggtgagggcttcctgccacaaatctgggaaaggataatatgggacattccacgatctaagaaaagggtcctcagcatacagatctggtagcaatgaaaaaaggaaactcgtctctttctgcaacattatttgaactgaaccccgagggcctaaaggataatttatcatgaaggtcttagctaagtctaggctgagacaaaagcgtaacaggcggggtttcaccatgttggtcaggctggtctcgaacttctggcctcgtgatctgccctcctcggcctcccaaagtgctgggattacaggcatgagccaccgagcccggccaacatgaagttcttaaggatggaaggaacctgagcgacagtagaatatgtctgctgtacaataggtattcagcttatgtttgatgaataaattgagaaaatggataaacacagttgggaagtgcaatatttttaaagaaaactcctgtaaagtagacgaacacttttgcaatagtaataatcatttatatttgatcccatctcattaagaggcctgggcccctgacccctctgacgtttccccatcccgggtgccgtggggcctgtgggcaccagaaagccagtgtccctgacaggacggcgcgcccgcatccttcacctggccattacctcttcttcctatccctcttgtccacgccagtgtctccaggagccaagacgtgctccaccccagggacgtcgcccgaccgggcagctctgtggagctcgccaagatcttccaggcggacatcgtgctggagctggtctaaggcgccctcaccgtgcttgctctcgctgccgacgctgttcttccaccagctgtaggagaagcccaaggaccactggtcccccgggtagtccaagtaccactggtcctcctggctcccaacactaggggtcttcctcgtggcgtagactgccggcttcggagaccccccagcccctccccgcttttctccaccccaggaggccatcagtagcgagctactgcctcggccacaacctcccagcaggatagcccgcggtttccaatctgcgaaaggaggaccgctaagccagaaatgccaagccaagcgatcactgccacgccaagcagccaccgcaaagcctcgcgggtaaggccaagccacgcgggtaaggccaagccaatccgttacacaccagtgcgcctgcgcacctttgacgtcactgaacctgtgccttcactgcatctgcagctccagcctcccagaaaaagactccttggtctgcaggtggtgctgcagctccagtgccaacctgggccggctggtcctccctcggaggtttgggggtggcggcgcccagcctgcctgtcatgagtgctgcttcacagcgccgccggtgcacctgctcctaggcttgctcggttcaggggtatgggccagttccgcccccggcttggccactgcagcgaagttgccctagggtcggcgctgccaggacgcaagcggagtctgatggctgggtcagagcggcctgtcagcccggctggaagggcctgcccaacgccgctgcccgcccagctcctacttggcctgcgcccggagccagggaccagctttgggcattctgctgccttaggatggggccgagcagccgctccccgccctgtgccgcagccgctgcgcgcatttgcccagggtccgtgcagctggcgacccgggcgggtcggggaatgcctggtgccaccgggattgctcgcctctagtccgtcctgacccttcagcccgcgagcaccagtgagtttgaagaaaagtgacggctgggcgcggtggctcacatctgtaatcccagcactttgggaggttgaggtgggcagatcacttg

SEQ ID NO: 6 - DNA, 2206 bp, Homo Sapiens
gggcattccctgggatggcaagtggcaccagcgctgtgagatggtttccttcctgccgtcaggcgtcaggaggcctgctcgggtctgcatgtgcctgggcttggcaggtggggaggcggcacccagggcagcccccgcattggaagctctaggaacttggatctaggctgaaggcctttgctctagagttccggattgctgagcttggaacagctcctcctagacacagtgtggcgcgggagcagctgcatgagggcccacgtactctgcacacatcagcagcccatccgaccttgtccctggtcatgcgaaacgcatgcccatccgacctccgaccttgttcctggtcatgcaggttccgcctgggctgtgacaggaggctcggcgccctcaggcacctggcaggctttcccgaccttctccctgagcgacaggaatgggaagtgagcaaatccaagtagaattaggaggctctcctcagaggagcctggcggaacccggtcctggctgtgtgccgagtggcggggcacccacagggagatgagccagtgcctatctcttgcctcagtctccccgtggtcgcctccttcctcagaaggggctggcccaggctggtgcctccgtggcccctggagcatacctgctgccgccttccctggcctctggcgacagcaggccttccgtactccacctgtcccccagccagcatggctccacacagaacacggccgcagacaaccctcctgtgtcctgcatagcgaactgccactctgcgtgggccccactgccaggttagggaggcaggagctgcccccaccccctgcccgggagctgtcgtctgtctttcggatgagtcaggaacaaatgcgtcaacactgggtggccgccctcgccactcctgcgcacgggccctgtggggagagccaggcagtgggtggcgtgggacaggtgatgcccatgcccagtactcaggagacctgcatggcagctcctaagatgggtacaagcgatcataaggagggatgtacgtgtctcatctccccacccaccacgggatcaggttgaggccgtccagggagtgcatgggagggctgcgctcggcgcatctgcagagatcccctgaagaggggccctggctgcctcccactggggtaggtgcgggcccaggtccccgacaccgtgacggtgctgtgggactttgatggacctcacccggggagcccaggcctgctccacggcaaggtggccacgcactgcctctgcagtcctgagcacaggctccatacgggacctgaggcctgggctccatgacacttgggctatgtgcttccctggtgcttccctcctggggatgaaatcacacccataggtaaaggtttgggagtggagggagacagcaggagacaaagcaaggggacgaggactctggcagccacaaaggcagcgggagggccctggaggctcctgttgggcagcgcagtcaggaaagggcccactaggtgggagaggcaggcgcctggtgagtgctgagatctgcaccacgagaagggctgggctcccaaggcatgcatggggcctgggagtggagggagtgtgagcgggtgttaggacggggtctggggcgagcgggtgttaggacgggcctgggagcggagggagtgcgagcgggtgttaggacggggtctgggagtggagggagcgcgagcgggtgttaggacggggcctgggagtggagggagcgagagcgggtgttaggacggggtctgggagtggagggagcgcgagcgggtgttaggacggggtctgggagtggagggagcgcgagcgggtgttaggacggggtctgggagtggagggagcgagagcgggtgtcaggacggggtctgggagtggagggagcgcgagcgggtgtcaggacggggtctgggagtggagggagcgcgagcgggtgttaggacggggtctgggagtggagggagcgcgagcgggtgttaggacggggtctgggagtggagggagcgcgagcgggtgttaggacgggtctgggagtggagggagcgcgagcgggtgttaggacgggtctgggagtggagggagcgcgagcgggtgttaggacgggtctgggagtggagggagcgcgagcgggtgttaggacggggtctgggagtggagggagcgcgagcgggtgttaggacggggtctggga

SEQ ID NO: 7 - DNA, 2170 bp, Homo Sapiens
gtgattttttttcttaggatttagcagtactccaccgcgctacagcagttagcatttctaaagcacacactccaacacccttcggccgtagcacattcaatccctccgccggggcgtgggggtctcctcccctccgagcacagtccccggcttcccgatttcctctgccccatccccccgccttccaagcacattgtgctcactcttccaggcagctctttcagcggccgggcagtagcagggttccgagcccgtcttctccggggcggtcacacgtgtccattccctggggttggggatcgctcttcccgcttggctgctgattggtgcctccccctaccccacccttcccgccgctctccagcctccatcctacttcgttccagctcaatcagccccaccgccttcttccctcggagaaaaaagccacttcagagctccttgggcgccgttctcggctggaataaaagcgttaagaaacaggtggaaagcacttcacttctctaggcttcatatttctagggtggacagcccgctcctgctccggctctgccctcggcatcaataataactgaactcccacacgtgcacgtttctgtctctagcccgaccgaaaggaccaccccgcgggccctttaaaaggacgcgaccactcaggccaagtgggggtgggagagctcctggccgtcctcccttgggaaagtgcttcaactccccagtcccaaagtcctggagggcggagggcgcctcgtgagagttctcgggggtgcggcccgcgccccctgggtcctgcggatctgggcccgggggcgcgcgccccgcccctccccctccctggcggtgcagctgtccgggcgggggtggggcgggggccggggcccgcgtgggattaactaggaccggggcgggagtcgaccgcggccggcggggagggctagccccgctctggcgggcgggcgcgtggcaggggctcccggaggccccgagctcccgggaggcgctccggccaacttcgggccggtggggaccgggcctgggcgcggggctctgaaggtgtggaaggaaagtttgggactccgttattcttccacagcgtccttcctcccgtaatatccagcctctttatcgcggggctcgggagcccttggagttgatctcgccaccattatccccccgggcgagcgcggaggacgggctggccattctggccaggccggaggtgttttccagcccggggctttgtgataactgggccgaaacccgagggtcctggagcgcggcgggtggcgggagcttgcggagcgcggcgcactcggcggccaggcatcggccagcccagcggcagccccctttctcctatttttatttttatttttggaaggagctgagaattagtcgattggttggcaggttgaattgccttctcttctatggcaatatgtgtcgtgacttttcaccttttgcctttggacaaaggtgaatggcaactgcgttggtcagtttttgttttctgttctgcggatgggttcgccgacgcagtaatcaaaattagagccactcttttggaagagcaaatcgttgttgttgcctccccagccccacggatcttactttgtgccattttcgggttgattttaactcgtttatttcagagctctttgcctcacctttatttttagatttagtcgtgtttgctgaaatatcagttgcttcttctgtgaatgaagtgtgggaacttgctctcgtcgcagttaatgaaatcaggaaaataaaaagatcaaaagggttggggatgggagaatgaagaggaatgtagacagatagtctagggccactcactggcttttggcgattcttagttccttaagctgattaaaacaatgtgaggaaatgtgggcttctccactttttaggaagaggtaataacgggcattttacgtggcgccacagcgtttgttttcaaagtttgaacgtgaatgtagcaagcataattttattaatgaaaatattctttagacaactgttaatattgacgaaagaagagaaacagagacacggaagctaaagagttgggaatcctaaaggtcaaaggatgtttctcagttactctgatgtcctgtgttttctttcagttggtacaaaatcgtgagtagtttaattatatcctgca

SEQ ID NO: 8 - DNA, 2455 bp, Homo Sapiens
ggaccctccattccggctgcagcttcccgcgcagtgagaaggcagcggtccctgagagcccagcagtgccctgggagcctgcagaacgcaggggcggattccgcgtcgcactggccgtcaaggggcggccgcggagggaaggggtgggtcggtgggtctgacagcgggtctgcgtaggcggcagcgtctgtccctcccagcctctcgctccgcgccatgggcgggccccgggctctgctggccgcactctgggcgctggaagccgccgggaccgccgcgcttcgcatcggagccttcaacattcagagcttcggtgacagcaaagtgtcggaccccgcttgcggcagcatcatcgcgaaggtggggcccgggccggggcggggcggcgtttaggggtgctgaccgcgctgacccccgcacccgccgctcctccccagatcctggctggctatgacctcgcgctggtgcaggaggtgcgagacccagacctcagcgccgtgtccgcgctcatggagcagatcaacaggtgtggtgggcagggcccctcgtcgcgaccccccgccgggatctcgccccggcgcggcgccccgaccctgagcgggcccctgtctccacagcgtgtccgagcacgagtacagctttgtgagcagccagcccctgggccgggaccagtacaaggagatgtacctgttcgtgtacaggtgaggggcgggccgcagggaggggcgcgcggggccgcaggtcgggggctcagcgggtcctccccatctcctaggaaagacgcggtgtcggtcgtggacacctacctgtacccagaccccgaggacgtcttcagccgcgagcccttcgtggtcaagttctcggcccccggcaccggtgagcgggccccgcccctcccctcccgccgagctctgacgcccccaccccttcccgcagcagcacagaacctggtgctgatcccgctgcacgcggcgccgcatcaagccgtggcggagatcgacgcgctctacgacgtgtacctggacgtgatcgacaagtggggcaccgacgtaagcccacccctcggtcccggggtccctgcaggcgcgccccgggggtctggttcatgagggcgggacctcgacggctcctgcggcggctcagacacggctccgcggcgcccgcaggacatgctgttcctgggcgacttcaacgccgactgcagctatgtgcgggcgcaggactgggccgccatccgtctgaggagcagtgaggtcttcaagtggctcatccctgacagcgccgacaccacggtgggcaactcagactgcgcctacgaccgcattgtggcctgtggcgcccgcctgcgccggagcctgaagccccagtcggccaccgtgcacgacttccaggaggaattcggcctggaccagactcaggcgagtgggccgtggggcggtgctggtcttgggtccccaccgcccgggcgcacgcaggcagcagggagggtccagcgcccaaggcagggccacctcagcttcctccctgcaccagggctcgtttccaaggaccctggagagcccggcccaccccatgtggagctctgggcaggcagggtaccttgcctttccctcaaagggccaatggtgacaccctctgccccggcccctgcccctgccccaccgcaggcagcagcaggggtgggcacccaggcctcaccggcccctcccatccctgtgggtggggtgcacttttcccctgaggttcactctgtccccacaggctcttgccatcagcgaccactttccagtggaggtgaccctcaagttccaccgatgactcgaggcctggctggggcatgccacctgcagaccctggctctgaggaatggcccaacagtggccccttcagggtggcagccacccttcagtgaggccccaaggcagagtcggctgggcgtggaccaggggccatggacacgtgatgtgctgctctgtacctccgttccccatctgtgggacgggctgcatccagcgacctcatggggtgttgtgagccccatgaggggtgcagggggcactgcccggcagatgtctgctcaataaatgagctgctcccggtcgggccccacagcttggctcccaggcctctgtccttcctcaggacccagcctcagctccttaggggcagccatggcctgggctgcccaccccatgtcctggtgggacgtggctgcccccggagcctgctggccccagaaggcagctcagggatgctccttgctcatcctctgtggaaactacaaacgctcccaggagcctgtactgtgagcacagctgggacagggatggcgccaacacaccagcctcctgggccctcggggctctcagaacagctctccccaggcccaccccgcagcccccattccagggccctgcaggggcccccaggcacttgtctgtctcaagagcccggt

SEQ ID NO: 9 - DNA, 2377 bp, Homo Sapiens
ccttggctgaagttgcggggagggggagtgaagtagcctggactgaacaggacacattgaaggggaagcagtaagagtggtgagtggtattacctgatgttcaagtccagcaggatctgctcttttctctgacctgggtgaaccttgactccaatgatgcgcaatggctagggagagagaaattcctgagagagggcagggatagggagaagtacctgagtctactccgggccactcaccctccctagcctacctcctcactttccctcctccacacataccttttcacccagttccactcgtgtaaatgtaaatgtttgcagatgggggttagatcccctaacagccggagccacagtttcagccagaagcttctccatatactggcccaggaagggccagacctgggccacaatctgggaggaaagagagatggtcagaggagagtccagtcttccctctcaaggcaagttccttcagaatcctccccacggagagcactgagggttgaggatgggtctggcaagaagaaacaaattcccattctcccctcatgaagactaaaaatcaaatcaatcctcaccttattgagccattcagccttttccacgtctgggaagctgacctggaggtggggaaggcagagacagtgacgtgcagcacaccctcgcctctggtttcctactaagatgctggtggtgtgccacagaggagagggagtgtgtgtgactcctcacactcagggtgggcgaggggcgaggatgccccaaaggttcattcctcacagagtttgggggctgatgtctctctaataaggggagctgacaaggtagaggtcacgctgttgccctgtggatagctcagggacgtggtgaaatgacagctgctgagagagagaggagcgggaggaggagaagggcgcattctttctggagggggaggtccagtcaaattggagtttgagggaatcctgggatttaaaaagtcctggttccaggctggccgcggtggctcgcatctgtaatcccagcactttgggaggccgaggccggcggatcacgaggtcaggagttcgacaccagcctgaccagcatggtgaaaccctgtctctactaaaaatacaaaattagccgggcgtggtggcgcgtgactgtaatcccagctacccaggaggctgaggcaggagaatcgcttgaagaggcagaggttgcagtgtgccaagttcgggccactgcactccagcttggcaacagagcgagactccgtctcaaaaaagaaaaaaaaaaaagtccccttttccagccttctcaactcccctcagacggggcttctagagcaggaaggtgaagagggaagcaagtccttccttgagtcagggaggggccagaagacctaattaggcctggctttgtgggttttttggggtgtgtgtgtgtgttttcctctatctttctctgtgtgactccttttaagggaaaggacacctgcgctttgtattgggggtaggaagattggtttccatgatgatgaggaggagacaaacacttgctgcctaggctacaggtcccctagagccatttggccctctttctcctcccctttccagtccagggcctgggaagcttggctgtgtctgtctagtgtcaattttgattcctctctgctgccattctccccctagactggcacctctgctgggaggggccgggtaaccggcttcgcctctgcaagactagagagaaggcatccgcctcagcacaggagacgcggccgccgcagaaataagggtctctgccccaacggaacaagcgcagcccacagtccggaaaagggtgtggccggccgaggagtgcgggggagtgtgcgccgcgggcactgcagcagccgcaccacctcctcccgtagccctccctccgtccagcagccgcctctgccgcgctgcagtctggcggctggaggcttgaaggtggctgcccgagggtcgtccaggggccggggctgggtcctagcgggtacccggggataaaagcgagaaaagagagaaccgtatggctttaagtaggtaaaaagtctcgaggaggatgggaaagactagggaaacctttgagaggtaacgggaccaggatttccaggagcagcaaagccgcgagtggcaccaaaagcaagagggacgttcaagatggcttggctaggagggagagcttcggctgagacggggtccccagatgttattactgctgttgcccaagtagaggaagaagtcctgattctgtggaaggatccagtctgggcatgcgaaagggtgggtggggagagtgagcagtcggttccaagagtggcgcgtccagcaggcaggcggctagcggggagagagggg

SEQ ID NO: 10 - DNA, 3687 bp, Homo Sapiens
gcaagcctccttccccggcgcacaggcacgcagccacaggccaagctgcgacgcgagctccgcgcgcgggatctccgcaaaaggtccgcccgatgcgttgggcgggaatcgagcccgggtcaactgcttggaaggcaactatgctcaccactataccaccaacgccgcacggcgcgggcagccccgccgcgccggcccggggctcccaccagcgcgccgccgacgcccggggcaggccggccccgacgcccggtccgtccgcccgcccgcagctccgcgctgccgcggcctctccaaaggccgccccgcgccccaccggtgcaaggccagcgcggctgacccgttacgcccgcctgcctctgggggcgctctcgctcactcgccgcctcgggcccccagagcccttccccaacaggtgcccgggggggaaacggccggcgccggcagggtccccactcctacgcttcccaccgggcgcagggccccgtgtgtcgcagaaagcctcttccgacaaccactttgagccggcagctcgttgggcgccgtgcagggccagaggaggcctcccggctgccgctaccaagccgcggacgagaagaaaagacaggaggccaaggaggcccagaaggccaaagggccaggcaggccaggcccgagatggcaccctgcgactagctggagggcggaggaaggagaaggagggcccacaggctgggtccgaggcggcggcccaaaaagcacggctgcctccccgtcggggaatcgaaccccggtctcccgcgtgacaggcggggatactcaccactatactaacgaggacgacggcgacggtcgccgggacgccagaccccactccgaccgcggacgcctagccctgccttgatcccctcccccgacggcaggggccgggcgcgtgctcgccttccacccgccgcccgccgcccgccacccgccacacgccacccgtcacctgccacccgccccccgccaccgttggcacgacctaccccgacacccaacaaagcaccctgcgatcccgctgggacccggagccggagccggaccccgacaggtaccggagcggcgtggaacctccccgcgcgccctgcctgctgtctccaacgcggggatcgcgccggggcaggaggaggcgcgggcgaaacagtcaggccgctgctcctaggacgcggtgggcgcacgccctgcggggttcggcgagcggaggcgcgggggctggggcgtgcgccggcggcggccggcccgacgcggaccctttgggtccggggtggggacgcgggggcgtccacgccaacgccagccggctccgttcacttggcgcccgctccccccgcgcggtccgtcggttgcgcaccgaacccagacaggcgccggccaagggcgcaggcgttcgcgccgggtcccagccatgccagcggcgaagcgccccggcgcgccgtcaggatggccgagcggtctaaggcgctgcgttcaggtcgcagtctcccctggaggcgtgggttcgaatcccactcctgacaagccgaccttttggcccgcccgccggagggcaacgcccatggcaaccctggagcacctttggccgcttcctgccttgagcccttgcccgctctccagactccagcccccttgaagcaagcctccaaaacgccgccgcttctcaggcacgtccgttcttcctgcccacccgccggctgtcgcagaaacagcccaggaccatgcgccagcgcccgcgaccctctaccaattgcccttcggacagacgccctccccaccacctcacacgccctcttccctggccccacacacagcgagcgaccgcgaccaccttccacgctcttccctgcctatctcctccgcccgccttctcctcactcgcccaaacagacacagcccagattcttcccctattcctccttttccctccttcctcccaccggcctccgcccaccgcccaccgccttgaatcgccgctgcgctgcccagaggcgtcctggcctgaacagcccgcccggtttcaccctccaacttctgaccgctgagcagcagcgagcgactcgctcgtggagccgcacacacgtctcccaccagaggcacgccatccaacatcctgtcctttcctccgacccctcggaccccggccgcgcattccattctgccgacaccctagccaggtcgccgatcccacctcgctacctgtgctcccttcccgctaacacctgcctgccggcccacctgcagcccggacgcctgccggccagaggcagcgggaaccctgcacacagccgggcaggcgagtccaaacccggaaagacagcccaagaggaatcacgagcggaagccctagatccccgtcacccgcccacaaacgcctggccccgccgggaccagctctgcgccacagcgcatccccacgcgggaagccgcggcctgggccgtcccagccacacccagcgcgccttctccagggtcagccagctgcggctctgccgaagcgctcctccgctcctttctcgcgctccagcctccctaccagcccagggggccggaccccaagtgcgagccggtggcgtgggtcagagcgcaggagcgaggcgcccacggacctggtctgcgtttctgagccgcacgccacggctgcgagacccgttccccatcgccgcccccgctcgctgacacacccatcccgcctctcacctgctggtgacacaagtgagaaggctggccccacggtggtgaaaaaaaaaaacaccacacgaaagaaagaaagaaagaaagaaagaaagaaagaaagaaagaaagaaagaaagaaagacagaaagaaacaacaaaaacaaaacacaaaaactctgggtctgtgccggggatccgcgctcagcaaggcccgccacagcaaatctgcccacacgggcattcgggcgcgggccacggccggtccttcccctggagaccccggcgggcagtctctcgaccctgggcggcagagaaagcgcaagatgggacgagtcggcctctctccctccgctctccctccgcgccccgcctcaggtccctcgacgtgacgagagcctccccttctgctcgccccatcgggccagcctctcgtggacgctgcaataggacggaggcccacggcaggcggtgaccagtgaacggcggctggtggcgagttccgctgtgccagcttccgttggcgtttgccatcggtgcatgggtggttcagtggtagaattctcgcctgccacgcgggaggcccgggttcgattcccggcccatgcagcacgccctcccattttggtgctgcagcagcaccaaggcgtagctgcgctcgcctctgccgcctccttacactcggggcgcgcgagcgagtccggcaccggctgcgctcccacgcgcgacggccctctgccctttcttccgtgcctctctcgactgacttagggatgagcctaccccccgcacccacacaccttggtgacaacaacccctccagacacgagagcgcgccagacaccagaacttggcagcctcctggtcctgtttctcttcattgccctgccaccgcctctgcccgacgcatttcacttcacggaacaccgccaggcaccacgggcttgcagccactcgcaccaccccttctcttcacatttcaccgcctcgacctctctc

SEQ ID NO: 11 - DNA, 2409 bp, Homo Sapiens
taaggtctgggtattctcaggcagcagggacaaggtgggcttttttcctggttgctaaacccacgtcaaagtcgagctcagggactggagctcaagaaacccaccgcccattctccagtccgaccggggacctgcatgcacctctgccgtgctgccctgagtcctccaatcctccacactcttcctctgttatgtacacgtctccacccaggcctgcaaaagtcccagcttcctcgcaggggcagggacccgcacgccggcccagggcttggcacgcggggatgctgaaacagggccaggcctggtttccagccgatcgtcagagtcccaaggcccagcaaccttcctcacaaaggcctcgttaagaggcgaggaaacaagagccgggagaggggcgcggaacggcgggcgggacgaacgaccagctccgcgcctccggccagctgcgtcgagccaggggcaccgcggctgttgtgcggctggaaatctaggaatgggaaggttcggggcctgctcggctccggaggcagctggcgggtcgtccctggcggcgttggagcggtcagtggcagccgggcacgggcgaccgggtcgcccgggtcgccctcagaccgtgactcccgaaaaaccttgcgggcggggcgcgcccgcgccgtctcttgccggaaggtgcgagttagtgcgctcgattgtgggcgggggcggaaagaggcgcgttttaaagtggtaacagatggttttcttatccaataggattaaaaaatttgtccttacccggccgaccgcggaagtagagtaggcgggcggccaatggggacatgatggggggcggagccgaggcctccgaagcggaagtgggttgctgttgaggcggcggcatctttctcgaggagctctcctgggcggctgaagaaggagcttcttctccggagtgcgccggcggtggcgcctgcggacctaactagctccaggttaggccgagctttgcgggaaagcagcggtaagtcagggccttgcagatgcgaggtttaggcagcttcgcggcctacagaggcctcggcccgcgcctcttgggggagccgcgctgcgcggcttgacccagccgaggctttgcagcccgggacctcgagccagctctggtcgctcgcactgccgtccgcgcgggcgcaccgagcccggcttggcgcgggcaacagaagttaggaggtctgcgtctgggtctcggctcaccctggggggccgcggccatggggcttagttcctagcctaggaagggaaactgagactctgggaggggcaggaacgcccccaaggtcacttggaaagtcgggcaggatgtgctgttagggggaagacccgggcagggtttttgttccccgctgacgacgcctcctttgtgtgttcgcgccgccgccccgccatcgtggggcctgcgagtttgccggggtgcgtgggccgcgtggcggggccttttgtaggtcgggaggatctgagtacgggtgcgggcctgaccgtgggggcgccgaggtcgcagtctaaaacttagtagggcctcgatttccgggcgcgcttccgggccccggctggtggttggtggaacgtgcgactgtgaggcttgcggcccagccctgcaccgctcgggcccttcaccgctctggcgcgcctatagacaggtgtatgaagattctcacgacccgaaacagagttgctagtaaacaccgcttttccgcctttgatccatcgagggaagagggaaaaggatagagcttgggcaagccgttttggtagggatttcagcttttgtctttcacttgtcagttcccatagacgttcacaaacttaataatcttcgttctgtttctgcaccaagttcttgagccagacgtagggtctcagctctggagcctggcttagactgtccaactgactggggagactgaggtccagaaaagtgaagtggtctgcccaaggtcacatagccagctatttggcagcagatgaggttaagtcctacctgcaagatttgggttttgaattcattgaccaggagttttgggaccactgtcaataaaagagacattgaagggaatcttttgttactttcttggtgatttgctttttaatggacaaggacatattgggttcagttttatctgtgagtttgaggtgaaatagaggcattcgagtagcaagatatattgctggcttttgtattgcctgaatttgagcttccaaaaatcttactttaacacatcgtttattgatcttttcttgaattactacctttgtaaggaccttttgtaaacattgtttttctaatcttcatgaaatcttaatgccatacgtaaactatttctttttatataatgtatgcacatctgtgctttgtacataaaatgagtaagattt

SEQ ID NO: 12 - DNA, 2356 bp, Homo Sapiens
caatatatatttcttaaggtaattaaagggaatacttatttttgtttgaggaaaaaatattttgtaagctaaaacttttattaacacagtaccctattacatgacttcttcctcttattccaaaataatggggcttaattttttgaagcgcagtctttccagtaataaaggcggacaaatttgcttccttttgcaagtagacactttttaaaggtaagaaagggaagattttgtcagcccagtttattacagttaatgtctctttcaccaagtgtccaactgccccgaaagccagatgtttcagaaagccagatgtttcacagctgttctggtggcaattacttcaagacagcggtatcaaaggctctgatttttagcttcctcatctaaaaaatggggacatcaattactttataacaaagctctgatgatacaatgagattacaaataaaatatcctgtgatgtttgactcactacttaactaaaatctttataatggatccatattcctggcctagctaccatacaccctgtcaagtggtttccttctaagaaaaactggggatgggggggttaggggggtgggagagcagcagggagtaggaggtagggaaggaggaaaacaagcaaaatcagtacatatacaagctctcccatctttgattgcctgcgttttttgtgctttcctttctcaagtttcctcaggctcatgttctgaatctcctcccccacaaatgaaacacaacggatacgaattacagagaattttacggaagacactggagcttaagtctgcagattagttttttgtctacaagcggaggcgactggaaaatcaagccaaataagcgttggataactctaaacagccaaagaagcttcaatgggatagggtccaggttcaccaaaggaggcaacaccagcaactgacgaaaccatagcgacggctgaccgaccatgactcgaggtacaagacgtcaaacctaaggctactaatcaacgtgcgtaagaagcggccccaaccgacccgggcgatgccaaccgcgcaaccactggtcgccgcgccaccccaggcccaggaatagcccagtccgcaacagggagacctcaaccagggagaggaggagcggggcaaaggggctgggtgtcccccaagccgctgcgcgggacgtggaagggacgaaagaggtgaggaagagtagtaaatcaattcaatacactcacacttctgctgtgctcccaggactacgagaagcgggtagggggcgactcccggcctctttcacttcgtaaaggccttcaactgggtctctcggtcaacccctcagctaccgccatcttgaaacctcgcgcccctccgcactcctcacgtcatttcccattcctctgtcccgccttctcttagcgccgcttgaccctggaaccatagagaatacccaagaattccaggaccagagtctcttccggttccatacaatactcaattggttggttgtcggctaagagcccgcctcattgcgctcatctagtacaataggaattagaagaagatagctgctaactgagtggctgacggtcctgtctctcgagttggaggcatcttgacttagttgctgggagcctggtacgttgagccgtccgagaacggtacattctgcagataaagaagcgttctgcgttttctgtcttttggaattaccttagtttttgcatttttctgtttcttatgacccaagcaggtgcgatcctttaggggtgtctccgtgtgtaaacgaatacccagataacatttgccactgagtttaatccgctttgtaagcatcaggttatcccatgtgagcgcctagtacgtgtggaaatttaatagacaggcagaacagaacgtttgtagaccacctgaacaaataaattagcacccgtattagagtcgcagattgcttatatgggcggtgatttattatttgttagtagtgttttgaagaagaaatacggggatacatatgcagtcggttttaagttatatgagtggcaaggttgatatatattggctatattcccgactggtcttttcaccagccaaaagtcctctatgatgtcactctacgtacgggattcttcacttaactctagccttcgccctttccctaccttctatcccctctttccgtgagtcagcccccacttatttcccttaaaggtaagtttaaacatttaaaaaactatcttagaggatacgcttggttatttctaatcttaacctgactatcccatgtaggaaggctattcttaccaccagttataaatatttcaaaatattgatggagatacatactaatttttagcagaatctttaaa

SEQ ID NO: 13 - DNA, 2403 bp, Homo Sapiens
cgcgggcgcgggagtagccccgctgggcgctcgcagccgcgggagtcaagccccctccccaggtgcaggcataaaagtttatggctcttgaacaatgcggggcagaggtttttccaagcaacgtctaattggccgcttctaattaaggaaagagaggcttccagctctatggcaacccaagcagggcagcttcaggctaaaggtactttagaataataagatcattctaagaaatggaatgtctcactggacacccgaacaggttctctgtcattggaattggtgtgtactgtacttcaaccagtactcttgtgtggagggaggcgacccagtctaggaaagtcaactacagaaagaggtgacctccgaaaggattgtcttagcgctattagaatacatgtgaccacaccaaaagcccaggcggacacccgcagccagctcggatttggacaattcaacattgctggcagaactgaagggaacaagttaccccaaccccatcccctgtacgcgtagtgctgagtgagttgggggtgggaggacagcggttcgtttattgcccccttttaaaatctgagatctgaaaatatggaggtcccattcgttttcccagctcttgattgccaacaaaaaaacaaatcccgctggctacattttctcctcattccaaaatagcaaccctatggcttgtattaagcccttcagaagtttatctcatttgctctgggccagggagggaacaatgctaggaaaagtcaccggtgctcttccatcctcgccccttccagggtgcaggatgtgcgggccggcgggcctgtgatcccggaacgcttcctgccatccccttgcgcgaacttgaaaggactgggaggtgttgagagcagagttcagggctggtgcactctgcggtgctgagtgggcggcgcgcccgggcgctcaggccgggggacctgtagtcgccctaccgcggaggggaaaatacgtagctggagggcgtgcgccgtgcgggttgtgatccgttaccccatcggtcatcctggggtctccccaagcctctaggtagggctgtgagagtcccctagagctgaagccccggaggctgacctgtgggtctggctgctatgggaacccggttggtccaaagaagcctttcttccgggcacctggaattccagtttagtgtggggcatcggggaagtggcgctggggggctgggttgggggacctcagccggcagctccggagagggcctacccttggggtcgctgggtgaggccggcacgattcttggctccaaaaggaaagtttctgcttcttgttctggcgcgagaagccaaagacttattttgagagcggagagagaaatgttattggtaacgttttctttggaaagttcgagaggggtcttctggacacactacctagtgcccccaaaccagagaagtagtttttctttggtgcctgggctcagaagtcgccactcactcagcccatggttcgaaatcagcatgggaagcgccggggcaaggcttcgtcggagactagaggcctgcctgtcgggaggagcccctgggggatggggaccccattctcctgcttgctctggttcccacctgggacgcctccgtaggagcccagaaagacgatccactacatggtcccgggacagagcagcgcgcccaactttgagggaactttgtgcgcctctctgaggccctagctttccaaggcaccgccgtccgttcttctttccctagaccgaaactggggaagagtgtgggcgcttctttgccccgatgagttcgcctccccaaacgcctacttcggctgcaccagagcatctgggaaactctgaaaggtgcccaggcctcacacagcagcgtctccctactcagcctctgtctttgggttttttcaagagagtctctacctcatgcctcggtctttcttcgatgtcgggtccccgaggtaggcacggagtccctctgaaagcagttgcctatctgtgcccctttggtgtaaagttagagtttactttgttgggggaaggggaggtagaaaagatcacagttgggaaagtgcgcttttcgccttgttcctaaaacatgcctcaagactgtcatcgcgattgttaggagagctatcaacgtctaggggctataaaggaatttctgaaccctcggcccttcccaaacccccaggttcctaaaaccctagtgggggtctcttggggctgggattcaggctggcaccgctgggaggacctcgcctagcatccctttattaatatttcacgaaggcaggctcctgccttctctggagcctcttttctcggaatgttcccaaactctggctaactcactcccctgtgagccatcctagggctctgtggcccgggaagag

SEQ ID NO: 14 - DNA, 2229 bp, Homo Sapiens
tctttcctcggcgctggctggtgcgggttggggtcaggtggagaagccgctctttgttaaggtgacagaacgtgctgggggtgggggccggggccagggccggtgcaactagggggccgctgccctttcctggacacagtggaagcttcttccgcatcaccaaatttttgtcatcctttctgagggacctgcttccaggcagcacgcaagttgttgtcccgggtttactccgcacccctctactgggtgaggaaggagcatcttgaatggagatgggggtgtccccggtttatacatctgcagagaagaggtgtgccgggctgcacctctggaggccgcggtaactgatattagagaagaccccggttgcagctgggaaggctcactggctggaaagaggtgcctcctccttccagcaaagggccctgtttggaagggctgcttctcacctgtctagtggcaccacaggacggtcggcttccactcgaattcccccggacggtatcatcacatagccgggtcctcgcagtgttggtttcccaatccgatgactgtcacctcggtgaggacctgtgctgatggccggagaaccctgcgctgcgggcgcacatggccaggtggcgcctggcaggcgacgtccgggtgcaggacggcgctcttaccgccccaccccaaaccgttgcctgggcctaggtccttcggcttcctgaacaggggtttggggggctaaggacgctgaggctccgggggcaggaagttctctctggttaagcgttctctcttctctccggcatacactcccctacccacccacctcgcctaccctcggggcgagaggctcaccaaggcagggcgcgccccccccatgaatcatcccaaggcctctgagccgcgggggctccgggcaactatccccctcctctcctggcctcaggcaccccagtccaggggtctgcagagaagcccgaagcccggacaaacgcgccggacgtcaacaacctctcatccctggcagcagcaaaggccaatatatttccatttcttatttcagtttgccaccaaaacaaagctgcgcgcggctgagggcaggaaggcgctgagaccgagaagaagggacgtcccggagaaagtgcgcccagctgatcttagaaaccagagtcctccgggacttcgccgagattttctgtagggcgttttaatctgttttcctactgcgtgccggcgtcgcagcgcgtgcggctcagggcttggtgactccggcttagcccggcggtcgcggcgaggttcctggcgcagccgcttggaacttcgcattagaatcgggaccgcgcaaatgccctggctgaagtgtcaccctattcaagaaacactgctgtcaggaacaaaatggggtccccggtgctccgaagtatcttctgaaattttcttaaaacaacttacaaaaaatgtttttgctttaacgttttacaacgtttaaggaaacatgtaaatggtctgtttctttatcgagatggtcgtcctaactaacagtgtacacatacataacaattcttccaactttcctcctcagagctaagcacttcactatatgtaaattataataaagaaaagattgtgcaagatcatgcaagtcgattgacttaaaatattgagttttaatccaggccctctgtttttctatttaacaacttttgtgtttggaccagactggtgaagcaggctatggaaattaacaaagtaaaaaattaaaagcatcttccttcgccatccctccctccaaaattaaacaacagtcgccccttcctgagcaggcttcagtcccaggctcgagttttcctgcgatcaccccacagtcacccacagcagctgttgctgcttctgtcgggttttcgtttctgccttctttgggtcgtctcttgtatacaaaacacaccccagttctctaactaaattcaaatacgaccccggcagaatttacacatttcgtggtgcatggattgtgtcggtgcaggggaaataaataccctctggtatttaaccactgagtctaattcgaaaaatcgggactgggcccctaggcggcaccccaggggctccaacctggcccgcgcctccccagaccttggcgctgagagcgctgcttttgcgggtgggtggacggagaggtaacaatctgctttcaacaaaaacctgtcgccaccgaatcgaaagcgaaagggaagggagaag

SEQ ID NO: 15 - DNA, 2354 bp, Homo Sapiens
tacaacttctggagtcgctactctcggtttactaccaccgattgccctgggtctgatggagccagtctcgtaatacctgcccagaattttactcacacatccgttggacacctgcataggggaagtggacagaaaaccacattattaataatttcaagacaaaaataaaattgtttaagtatgcattaaacaatgacaagcttacgttttgattgtccagcacttggacttttgcatctgcatgggtctataacacaaaaatataccttcaatggtatgagaacttactgtagagagctttttttcttaaaattacatttgtagccctaaaaactacaaatatgatgatactttcaaacaatttgaactaaaaaacgaatttaaaagctttttttaaaaaaaaaacttttcttaaacactgcctgaagatgcatcaaaacgaagtagataaatttatttttgtgctgaccttgcttaaagtggcgttatgttttaaagaacaaaggtaaaaaataaactgatttttttacttcttcttctttaaaaaatactcaattgagtaaatgtgagttagggaggagtaaatagcatttgccttttaaaatcaatatatattattcataaacatgaagaataaacaaatacctcaaaagctgaggtaagcatgggctggggagagcagaatgaaattatgccggtttatataactcagcttattacggttcataaactgttcccacaatgaatgtctttaccaaataaaaagagaaagatttttttaaaaaaatccgcacacaatatttttctgaagcagatgagttatcttatgtaactgacccaggttgaaagagatagggaaggatggtggaaggagaggggaaagtgggaaggcaggggagtgggtggggggactggggactggggtgggtgagggtgggggggtccataattagcatcgtttacagtaagaaatgaagagagggcgttgagagtggagggccgcgggggcggcgagtggggcggcgccgggaggatcacctgcagaattcgggaaatgtcgcacggccgggccccgctgtgagctagctctacaatcttctgccgggtggagtccggcagtggccgcccgttgacaaagacaccaccgagctgattcactccgctgtgacctgaggaaagggagaggagaggaaaggggaaaagaagagaagagagcagagtgaagaggaagaagagggagaagaaggaagaggaagatgagggagaacaagaacagaaaggagaggaggaaggggaagaggaagaaggagaggaggaggagacaaccacaatgcatcctcatccccctgccaacctgtgccaacctcggcggtcagttccctgctatcgatcaaataaaggacaacaggaccaccagccatgccagacatcgggcagcccagtccaagcaaccgtgcccctgcccactgtactgcagcagcaacacagagtcagacacatgccaaggaacaagtacacatggacctcactacagccataaccccagcagtgtccccagcccactgcccctcttcataaacactgcagccagcctctgaacccacaaagcgctaagaaccggctctataaatctcccaaagatcccctctgagtgtcaccgcaaaccatgggttctacagatcccacactgaaccttcaaggtctctgcagtgttgggacagtgatagcaaaccttacagcccttgagtgctcccttagacgctaaaatccagaaatgtttccatcaccgtccaaactggccaaggcctggcacaagcatcgagttgggttttgtttggttagaatagaagaaggaagaggagagaacaaccagagcagccagtatgtggctggtgaaccccagtccaggtttccgcacctccagtgcagacgtgagagtcagagcccgggctcggcttcagccacagacaagtccggccaccgcaagtaaggcttagagccgggagtcggttcgcaccagccactgctcgctttatttccgccgctgaactccgccctccccttagccaaggatagatattatcaaaaagaaaaaacagaaaagaaaaataccacatcatagtgttccccatccctcctttatctttgtatctcacaacctcatccctgtggtccaaccttagagaatagggagagggagttagcccctctttgtagtccccctccccaaaaaccacagacacacaaagccaattgccaatttccacttccttaaaaatctccaacctgcagccccgacttagatagcagccctcccaggaaaagacgtggctccctgttcagctctcctctcc

SEQ ID NO: 16 - DNA, 2738 bp, Homo Sapiens
tgtattgttgagggtcaccgaccaccgagaatcaggttcagttctcagaggaagcgccagaggagggggagggtgggcgagggtctcggggtggtgggggtgccggccccagcatgtggaggcgacaggatccgtaagaccccacgcgccgccggggcaggaccgcacagggccgccattcactcacttggggcgtccctaatgggcactcgtgcattccagctcgtgcggtgagcgcacgcacgccgccgctgccgcgttcacacggccccccaaagtcgggggaggggtcgtggagcgaaggagctgtaggcagattttctttctctttccgagctgggaaaagggccagccccgtgccctgcacgcctggctctgctttgcagcttgccggtgagccaagagccggtagagcagaggaggcgcacggttcgggtcgtgtcaccatttcttggcttgctgacctggccaggagctggggatggcggcagcaccgcggaggtacgctttgcgctgccctcacgctcccttccgaaagcagtgcccccagggggaaagttcgcaatgccatttgtctcgccggcaaagttctgggatgtcgggcatcttttgaggagggggaagacgcggcacccttactgaggccggcaggccaggaagagaagttctccgggcgcagggcgcagcccagctccggggaccctctgggcctcccgcgtgccggccgggatgaagcgcgctttgcaccggacccgggattcgggggcgggggctggcgctggcagcgtcagacgctgcttcatttcccctcgaccctggggaggacagcaacaagtcctgccccagccatttcatcaccctgctagcacgtgcagattccgggccctcggagcccggcgcggacctcgccttgcctcgcgcttccctttgcacgtcccgtgccatcccaagagtttgcgtggccctgggtgggcgcctggctcccggcgaaacgcctggggcgcgccgcgtgggtgcacggtgtcctctcccagtagctcccggctgcgggggcacatgcacttacctgtattctgcagggacaggcggcctttctgctgggagctcctgtcttggggaccctcgggtgggttggtggcgtcggtcccccgcgccgggtcaaaggtggccaacaccaaagccagggtcatgaactggcccagccgctcggcacacatggttcttggtattaacctcccgtcgggagacctggatcctttgtgctcccctcttcctcctcctcctcttcctccttcgccgcttcccctcctcctcccactcttcctttttgctcgccttttccctcctcctcgcggccgcggctcggatagaggttacccagcgccctcccgtagctctccggagagcatgtgaccaggccgttagcagcgccgcgagtgcccggcaatggcagggatggtgcctcaaatatccctggaagctctggtgtcacttgaatgaaggagtcgagcaggtgttgtcccggcggctggaccaatccgagaccccggcccttttgacaacacggccgggaggcggggcctgcgctcaactactacaggaggaagccgagcgccgctgggagcgccggacaaagttgccgacctggcggcggccacgcgtttgcgtgcgtgtgtatgagtgtgtgtgagcgcggccggagatgcgtgcgcgtgtgcgggtgctccagggcaatggtcgaaaggactgtacaatataagagcgaatccaagctccagttgctgttaaagggggacggtgtgctctgggacagtgtccctggggcccctggctcgcgtcacacccacatcgggttgggaaagtttcctctttccgccgtttggaattcagtgagattcccagcccagaggacttgataaattgaagcagtttcctaggcacaatgatgctgtgggccaactgagcacacatgggaattcctggccttgtgacactttgcattaaaaagaaccccacgattgaagataggagcagaagcactagatacagtatttggtctgagcaactgccctatcttcccgctttggtgggccgtgcaacacctggagtgtcgtttctcgtctttcccctaatccagacgcattccaggctgggctgcagggatccaggtgacagtcaggacttgcatcatttccaggagggtggcagggaggcccaaggcagccctgagtcagcccgccgcggagcatcgcgtgcccggaggccagagcttgaaaggcaactttacgcgtctccaaacacactcctgcattttctcaaagcgctgctcgccaccccgctccgggttcccttttactctccagtcatccgatggaagtggtgagaacaaaaacaaagacaaaaaagctaaatccggggaagttatctccatctcctcccttttcttgttcggccccctccccaagaaccgccgggtcgggatagcccccggctactttctcacccggcccgtggagggaaggagaaagttgggcgccgcttggagcgcctcttcccctgctgtgtgtgtacgtgtgcacgctcacgtctcccccgcgccggggccggggacaggaactgctctcggtcccgtcaccccacggcgcagctcggggggctcgcagggctgggggagggcggggacacgagcgccgcgcccaagcgccccagggcacgcacccggcgttggcgcgcactcg

SEQ ID NO: 17 - DNA, 4102 bp, Homo Sapiens
gcgctgtcattcaccccgctcctctccgcgcacagccaatggagagacccagtcgaaaccgcgaagctctcttgcaccgggctttttcgcctggtgattgatgtcccagagtcaacagcgagcgagcagccggagcggggaagcagaagccagagaggggaagaatacggcgccccctctctccctcccctcccccttctactttagcctttctgcgcacttcgcttccaagtctccgcgcagccaggagccgctgttgcctcccagcccctgctagctgccccccgagccgagcgcagcgagcgccgccgcccgggccccccggtggggccagggccagcatggagcacctgggtccgcaccacctccacccgggtcacgcagagcccattagcttcggcatcgaccagatcctcaacagcccggaccagggtggctgcatgggacccgcctcgcgcctccaggacggagaatacggccttggctgcttggtcggaggcgcctacacttacggcggcgggggctccgcggccgcgacgggggctggaggagcgggggcctatggtactggaggtcccggcggccccggaggcccggcaggcggcggcggcgcctgcagcatgggtcctctgaccggctcctacaacgtgaacatggccttggcaggcggccccggtcctggcggcggcggcggcagcagcggcggtgccggggcactcagcgctgcgggggtaatccgggtgccggcacacaggccgctcgccggagccgtggcccacccccagcccctggccaccggcttgcccaccgtgccctctgtgcctgccatgccgggcgtcaacaacctcactggcctcaccttcccctggatggagagtaaccgcagatacacaaaggacaggttcacaggtgagtccggcccgcgcgctccccgcctggccgcggcccgggctccgtgctacccctgccccgccgggtggctccccaaagccggttctgcgctccaggtcgcccagctcttcttggtgcttcccccaagttgagccgcccgcccgattctataacgcagactcgccatgcttgaagagttctctcagcctggacccctctctgtctcccgaaggacccctgctcggaggagctctccctggtcccctctccggatccactagccgggtcaggcagagagaaggaggccatagattcaggaccaccttctgcagctactcttggcctgggaatcttagagaaaggggtgcaacgtgaacagtttcttccgtcctggctgctgttctaggacccaggaagcgagccccaggatcagacacaagaaaagaacaggttcccccacctccagtcccctacacacatgcacttcgcgcccctagctccggtgcccgtggtgctgcggggccagtgggggctctgagccccggtaaatcagcagaaccagtggcctttttttttttttccggagagcaggcttcatctgggaggatggcagcggggcttagccgcccaggacagctagcttttcattttcgttctctcccggctgggtgtcctaccccgggcccagccctgttatcttgggcacgaacaatgcaccggtaggctggtgatcggtggcgggaagactactcccgggacattgggtactaagtggtggccgctgccgccttctctgctgcccgctcccgccttcctctgctggccctggctccctctgctcccgtttccactctgggcactcaactctccctctggcgtggatcccttcccccgttctcactttctgctccccttagggttccctggatcctagaccacgatccttccgtccgggctgggaagcagccacaaattgagcccaggttagccagccgatcttagagagaggaggcaggaggcactggctgctgctggcagagatggggcctcctgggggtcccccggttcaagggcccaacagtggaaggggggtttacataactacttgggagaagctgctgagagctagatactgggccaggagattccaaagcacccctggcttcctgcttctgttccaggcagcagcacagccagggaaactgcttctgcagcttcttaccagactctggggccacggcagaagtggtgtggaggctggtgtccagaggaagaacagttgcttgggtctaggcctcaggaagggccctccctagaggggtcccagtgcccccaacctaagttttctctggcctggggcagcagggcctggtgcccatcccattccccacccaggccaggccagtcttgaagggccctgctggaaacccagccgggagtccactaatcctgggcctctggtgaaaggtactcggtttagggcctaccgcggggccctaatactgtgtcaggcatgaaggcggtttcagcgagtgtatggctgtggccttgttttgctctgtgtcctgtgtgcttgtcccgtgcctgtgcttgtctggtcctgtttgggtgtatagatctgtgagtttgcccccgttgtacgttgtgttggtgtgtgctgctgtggatggaggctcaggtcgggttccagagtcaggctcggcctcttactctgagcctgaaggcctggggctgactgaggggaggggagcgtgaccattagctcgccttagactgcccctggaggagaggcggcagggaggtggttgggctcgcgggagcccggggccagggaggcctccgtggtagcggcgacggcggcgtcggactggcgggcaggaggaggccgtttcccgccgtgggcttgtcgctgagggctaacgggaggatctcggccctgctcgtgggggttcagctgctgcgctcgctgactcgcggggtgttgggcctgggacgcttcctgacgctctgctgcttgcctctgccgtctgtctgtctcccgctccagtggccctctcacccttcactgtaacacgccgtataggtcacccctatcagaaccggacgccccccaagaagaagaagccgcgcacgtccttcacacgcctgcagatctgcgagctggagaagcgcttccaccgccagaagtacctggcctcggccgagcgcgccgccctggccaaggcgctcaaaatgaccgatgcgcaggtcaaaacctggttccagaaccggcggacaaagtggaggtgagcaagcggggcgggccggccgcccgcgagcggcgcggtctcaggcagctctcggttcattggcctctcgtggggcgcacatactttttccgctcgcggtttctgatcctttcggaggagcgagctcccgctaggcttgcggggagctggaagcaaccgaggccgatagctgggatggggctgaagagccctggctctgttttaccggaggcttcagggctttctggttggcacactctctgccggtgtagacgcggcaggtctattccgccgcttgggcaaacaggcgggttagtgcactccacgcagtccaggctccagggatctgtgagtcctggggagctttttgtttgcgcaaactcttgcttatggaatcctgctctgtcctggagactggatgcagaacagcccgcaccttgttgcagcgctccagccgggctcccggcagagggtctgtggccccagaccgcggccctgctgacggtctcctcccccagacacccggcctttgcgcagccggtccctaccctggaaggagaaaatcaatccgcgccggctgcggcggggtttcgcgggtcccactggaaggggaatcaattaggagcagatgggtgtgtgtgagaaagagaattttccttctcccatagccacaactctagttactacgcaatgggctttttgttttgttttgttttttcacatttacgctcacggacgtgaagcgtccccaacactctcgagcagcctccctctccgcgcgcactgacgctttctccggctgcaccctctggcacgctgcaccctctggcacgctgcaccctcccgcacatctggcccttgcccgccggagtttctcccctagctcaggccccatggggtagcgcgggagagtctgggcgaagtcggcggcgccgagacgggcg

SEQ ID NO: 18 - DNA, 2337 bp, Homo Sapiens
ggatgacactaaaagccccatcacctggcctcctgccctggggtctccaaggagcaagggaaagttgtggccttcggcctgtgcctggctggtggctttacattcccctacttgaggctgatctcctacttgaggctgatctgctacttgaggtgggaaggggcacctggagccttcagctgcagggtgagagatacccagtggccccatttttcagtctccagagccacaggccaggagcggagggccaaggctggcgaaaaaacctggccatgtggacgggccaaagaccaggggtcgctgcgaaggtgaggacagaaaagcgctgcagaggcccccagactatggctccgtctccgccagagagctttaggggcctcagtggctcccttagtgctgtgtatacacgaggaaaggctagagaatgagagggacacagcacctctccatcccccaagtctgcacggggagaagcggctgtgagcctcagcaccagggaaacgcagcgctggggcctgggcaggactgatcgctccagcctttatctcagctgtaacttcccagtcgaacagggctcgcttcggcgggccagggctctcgcctttgctgaagaattctggctcaggaaagatggagaggctgggggttgaggagagaggaaaaaatggcaggggaggattggaggtgaccgagcgtcgagttttcacatctttattattgttgttgttgttgttattattattattattatcatcatcatcatcatcatcatcatcgaagtatttcacgtccagagctaagacaagactacaaacacaacacatagaaaattaataaaatagaactttgttttcttctgaggctcctcttcttacttctaggtagtatgtgctccttccagtggctttggggagggggtgggagagacgacaggtctgggatcagggagtcttcaaggcccccgctgaggggacagcgaatctaccattgaaccgtgcacgggggacatggacaaaatgagacgcgacagggacaagagcattttgctctgcttccaggaaacatcaagtgagtccgctcctcagttctcaccaggaagcctgatcaggctgaggcgagttcctcgggaaggaagggcgcgcgggatgctgggtgggctcgagtagtgaggcctcagagcacccgccgggagctgtgcgggcgggggcgtccaggagagcgctgggccccgcctgtctgcgccggagagcaggtctcctggctcccccacccgagagccttccttcccgggtctctctgacgcccgtggctccccacaggcctttcccctcgcgtcctccctccctttccagcaccttcactcggcctgtttttcttcctcctcctcggcactgagctgagacgcgctgagcagtttgctctcctttttccacttcatgcgtcggttctggaaccatatcttgatctgcctctccgtcaggcacagggcgtgcgcgatctcgatgcgccgccgccgcgtcaggtagcgattgtagtgaaactccttctccagctccagcgtctggtaacgtgtgtatgtctggcggcctcgccggccgctgggcccaaaggaggaacctgttacgcagagtggagatgctgaggcctgcggtcaccgggcccaggaccccctcccctagtcgaccctcgaacacagactccagccagtaccgggatgccctctattctgccggctcccttcccccgtttcgcactcctccagcgccccctccagattccctcctagtctcctaggcctgtgccgtctgtctagactctagatgggggaggggaggagcagtttgaactcccacctgagcctggggggaggggctggtcaggtgtgtctcttcctagttgcatcttgtctttccctccctttccatccatcttgttcccaccccccgtcatccccccaacccaatgataaatccaggccgttaatccgtaatgacgtagatcgatccatagtccacattaacggctcctcactttcgagtccggctaatggacatcagttgggacttaaggccaacaaataatccaacctgagaccccgcgcctgtttctccctctctcgctccgcctgctccctctctcttccttccccttattcctcctccctcctctgactaccacccctttcctggtgcctcatcttgccccagctccccacccacagggaaacacagtcccagacagactcaactcttcctcttcagcgtcaccccctacccccttgcatgacgcactccgtttttaatggagccgtctttggttggggaaccctaccagggc

SEQ ID NO: 19 - DNA, 2351 bp, Homo Sapiens
cagctgggatgcattgctgctccttccgccatcccagcagctgtccagagatgagacccagccccactgtgtctttctgggattcacaagaatccttccctgggctgagggggcgttgctgtgggtgtatctcatggagagccccaaggagccagggaggagccttctggtggtttgggttctggattggtgggtgctgggtgggtcttcatggctgttcttggggctgccaggcctgcaaggtagacaggcctctggacttgagtgtggctgtggacgagggcagcgtcgccatcagaggcgatgtctagggccaccccctctgacttgcctcctcctccttctgacttgcctcctctctctgacgggcctgctcctgagcttgacacctgcctgggggctcccggcgaaggccgctggtttctagaatgcaccatctcttcctggcatgacgggaaccacctgtgacattgccaccacctcgctgtaatctgggcagcagctgtcatgatcccaccatgtgccccccgtgaggcccccacctgttactgagtggcagggacgtgctcccacacccccatgcgccatcctgcaggtgctttctgctgacttctgtgtgccctggggcctgctctcttggtaggggttgaccctgcctgtgacttagacagcttggagggccaggactgaggggagggggcggtggagtgaaggggagggtgggcgctgctggcaagaaccacaggcaaagagggtgccgggggcagggaaggcctggaggtttgaggagcagaaagtagacccttgaccctccctgggctggtgagtcggggcccagcccagagtgacagggaccaaacctgggtccatgtgccgtgcccagcctggggttcaggtttcttccccgtgagctgagcagacagggagggtcttgggggaaggctgtgggcccttgggtggaagagtcttgggtgaggcccctgaactggtaagcggggcagcggcggcagggggcccagggaagtggggccagtcgggggtcctcaggggtccttcagggatatacctgctgtcagggtgtggggagtgggaagtgggggacggggtggattccaggattccgggttgtgcttggtcagagtggggaactggacgctccgtccctggctcagcctctcccggctgtgaccttgggggaccattgactttactgtgtgcctggagagcctaatccctacctgccagtgggtgacacagaaggcaggaatgcagaaggcctttcagaagttctcactggcctgcaaggtagaggctgttttctgctgaggatacatttgccccctctatcccccagatcggcggctgctcaaggagcctggtacagctgcacggaggcgcagcacccacaggacaagtggtggaatgttctggttgtccttggtgcaggtggcgggcggggctggggggctctgtagccttcctggcttcggtcccctggacaggctccacctccctcttatcgtggcccctttggcaggctgcctgccacctcaaagtcacgctgccctgggcaccctgcctcttccggggactggggctggggctggggcagctgtgtttatgggtgtactccctgtgctgggcactgcgctgagctcaacacacaggggctcggggaggtctgtgggtgcccaggccgagatgtgaaccctgagtttgtgcaactcgagtttcagagtggcggcctctgctcctcacaagacattgccctgcgagggggtcagccctgaagccggatggcccggcccccgctaccacgtggaggctccctgtaggtgcttgtgtagatgcccccgtgcggggacttgtttggctgatggatcagggggaaggttctccccacggtgtgaggcagcaccgagggctccgtgcccagcaggctcactgtcggcagttgggtctggtttgataaccgtggaccggggtgacaggccctgactctgcagagcaggactgtggaaaatggacactgatgctgcccggtggatccaggcagggccgggatgtttgcaggacccacgggacaattagaacgactgggcctgactggcacagggatgtggactacggtgcttgccatcagcagatacaagctgtacgcagtgggccgcaggcgctccctgggccggaacacatggacgtccaggtgtggaatggcccggacagcagataacaagccttcgtcgtggtcacccctgggtgtgggctgtgggttttaatcttttcatttttgctcatctgaattttctaattaaaaatatattgctttttaaaaataataaaagatcatt

SEQ ID NO: 20 - DNA, 6888 bp, Homo Sapiens
gcgccgcccgtgggccgccggccggccgcagctcgctggcgacgagggcactacagttgctctgaccgcgtagattatgcatgtcccggcctcgggaatttaccatgcattagaatacattagcgcctgcattttaaaaggctaaactattggctcccagctagggactctcggtaagtggcttgttagtgacgagtgtttgtctatactggcacatagcggagtcttttgctcccggcttactcgcctccaggaaagctttggggtgaggcgaaggcgattgaagcaatgccccttcccccagatcgcagctgctcaggggggacacagcacggcatctttcaccgaatctctctcgctcgctcgcactccagcctccctctccccagcgacccccccaccttctcctccctccctctccttgacgtttgattccagtagcaaaggaggtaaaaaaggcaccgagccgtcagccaaacctgaaaagtgcggccccgccccctccacagccactggtagcttcccgtggaaggcccgcctcccggggcagctgcggcctcggagtggttgcgcttggcgcccgtcgggcgtggccccgccccaggtccgggagggtaggttggctgccccggcgagcggcagagcccttctggacagctcccgctcacccaaacagaagacgtcggcgccggagcgggctcggacatggcgaggctgcgagccggcccgagcggcggggcccggtgatccctccctccctccccgtcccctcccctctcccgcacgcacgccccgtccgcccccaccccgcccccaccccgggcgagcccgcccgcagcccggggcgcacacccgcacgcgcactcctctccactcactcccgcgcccgcccccactcccgcagccgagccccgccacgcgcgccttgcccgcccgccggccgcccccgccgcccccgccgcccccgggccctgatggactgaatgaaggctgcctacaccgcctatcgatgcctcaccaaagacctagaaggctgcgccatgaacccggagctgacaatggaaagtctgggcactttgcacgggccggccggcggcggcagtggcgggggcggcggcgggggcggcgggggcggcggcgggggcccgggccatgagcaggagctgctggccagccccagcccccaccacgcgggccgcggcgccgctggctcgctgcggggccctccgccgcctccaaccgcgcaccaggagctgggcacggcggcagcggcggcagcggcggcgtcgcgctcggccatggtcaccagcatggcctcgatcctggacggcggcgactaccggcccgagctctccatcccgctgcaccacgccatgagcatgtcctgcgactcgtctccgcctggcatgggcatgagcaacacctacaccacgctgacaccgctccagccgctgccacccatctccaccgtgtctgacaagttccaccaccctcacccgcaccaccatccgcaccaccaccaccaccaccaccaccagcgcctgtccggcaacgtcagcggcagcttcaccctcatgcgcgacgagcgcgggctcccggccatgaacaacctctacagtccctacaaggagatgcccggcatgagccagagcctgtccccgctggccgccacgccgctgggcaacgggctaggcggcctccacaacgcgcagcagagtctgcccaactacggtccgccgggccacgacaaaatgctcagccccaacttcgacgcgcaccacactgccatgctgacccgcggtgagcaacacctgtcccgcggcctgggcaccccacctgcggccatgatgtcgcacctgaacggcctgcaccacccgggccacactcagtctcacgggccggtgctggcacccagtcgcgagcggccaccctcgtcctcatcgggctcgcaggtggccacgtcgggccagctggaagaaatcaacaccaaagaggtggcccagcgcatcacagcggagctgaagcgctacagtatcccccaggcgatctttgcgcagagggtgctgtgccggtctcaggggactctctccgacctgctccggaatccaaaaccgtggagtaaactcaaatctggcagggagaccttccgcaggatgtggaagtggcttcaggagcccgagttccagcgcatgtccgccttacgcctggcaggtaaggccggggctagccaggggccaggctgctgggaagagggctccgggtccggtgcttgtggcccaagtctgcgcgccgagtcacttctcttgattctttccttctctttcctatacacgtcctctttcttctcgtttttatttcttcttccattttctctttctcttccgctcttcccctactttcccttctcccttttctttttctttcttactctctccttgtccctgagctttcattgaccgacccccccccatttcattcgccctcccctcaatgtgccaacctttgccctatttccgatcttcccaggtactgggaggcgggatgggggtgtgcgttttcctctaggagccctgtctttccaagacccacagaaaccaggacctgcccttattcaaaaccccatgcacttcaagtctcttttagacaacacatttcaattttccgggctgactagtctccctgtgcagaggcagttgagaggctttgctctgcagagggaaaagagctctctactctcccacccaccatataggcaaacttatttggtcattggctgaaggcacagccttgcccccgcggggaaccggcggccaggatacaacagcgctcctggagcccatctctggccttggcgttggcgcagggactttctgaccgggcttgaggggctcgggccagctccaatgtcactacctacagcgagggcagggtgtaaggttgagaaggtcacattcaccgctttgggaggacgtgggagaagagactgaggtggaaagcgctttgccttgctcaccggccgtccttgccccggtcccagcgtttgctgggatttgccaggatttgccggggctccgggagaccctgagcactcgcaggaagaggtgctgagaaattaaaaattcaggttagttaatgcatccctgccgccggctgcaggctccgcctttgcattaagcgggcgctgattgtgcgcgcctggcgaccgcggggaggactggcggcccgcgggaggggacgggtagaggcgcgggttacattgttctggagccggctcggctctttgtgcctcctctagcggccaagctgcgaggtacagccctctattgttctaggagcacagaaacctcctgtgtgggcggcgggtgcgcgagctagagggaaagatgcagtagttactgcgactggcacgcagttgcgcgcttttgtgcgcacggaccccgcgcggtgtgcgtggcgactgcgctgcccctaggagcaagccacgggcccagaggggcaaaatgtccaggtcccccgctgggaaggacacactataccctatggcaagccagggtgggcgacttcccatggatcgggtggaggggggtatctttcaggatcggcgggcggtctaggggaacaattcgtggtggcgatgatttgcatagcgcgggtcttgggatgcgcgcggttccgagccagcctcgcacagctcgcttccggagctgcgagctcaggtttccacccccgatcccccgggctttcctcgcaccgctgagcccagcttgtggggtgcactcgaccaacgcccgacagggctggggaatgtgacaggcagcaggttcacccgggcttggggagggggagtttccgctttgacagcattttcctttgccgtctgctggtggattcctattcccagtcggtaatcgccccgcagtgttgatctaagaaggtaaagaaaactaggtttccctgcaaagagcctcccccaaatcggcggactccggatactttgagtggatttagaaatttatgtaatctttctcctttagtttatttttcatcctctcctacagttttctctgatttgctgttggttcggggcaagataaagcagccagtagagagcgataataatagcggcgggaaatgaactggagactggctgacagttcttaacattttgtcatagatccccccgaatgtcccaggctgtctctggtgggttttagtacccgccggcttcttgggcaccggggaccagaaggaacttggcagctggtcttaggggtacagttaaaggcaggatgacagctattctcctgctcatctcagagcgctgccgccccctcatgccggtcgcgcaaagaacacagcttttaaaaaacacgtgccttctgcccatataggtctgaaagtgatgaggaaagtaatgcttcgcctattagcgagtttcagcttttaaaatgatcccaagcgttgctgagatgagaaagcgtggcatcccgggggtcctcagccccacccgcgcccatggtgcaagtctgcagggacaggcccgggacagcactgcccacgctgctagattttccgcagaggatcgctgaagctgccttcgtgggagacagaatgcctcctccagcgagtggaaaaggcctgctgaggaccccgctttgctcgagcattcaaatgtgtgtctgttttattaccctgggttgaaaagggacaagagctttagcctttttatctggccattttatcagcaactacaagtgtgttgagtggttattattacataggaggcttttcagtttggggtcagtagatcagtctcttcagacactgatgcagaagctgggactggtaagtaggtattatgtgctcggagcgctaggggacaggagcaaatggagaagaaaagcggaggctttctccgcccggagtatcgatcggaatccccgccggtacgccgcagagggccctcgccgttgggccccgggggtttaacaagcccagccgctccgcaggcggctcggccggactctcagaccggtgcctggaagacaccgtccctgcccccctcccgccaaacctgcctcttctctttctctcataggttataggttccctttctctctcattttggccccgcccccgggtcctgccaaacagccaagcaggccggggtttagggggctcagaatgaagaggtctgatttggccagcgccggcaaagctcacccttaggcgaggtcacaacagaggcaggtccttcctgcccagcctgccggtgtagtcacagccaagggtggcacttgaaaggaaaagggagaaaacttcggagaaatttagattgccccaacgttagatttcagagaaattgactccaaatgcacggattcgttcggaaagggcggctaagtggcaggtggttgcaaccccgcccggtcgggccttcgcagaggttccccaagaccagcccttgcagggcggttttcagcaacctgacaagaggcggccaagacaaatttctgcgggttcgagcacacactctcgggcgttgggccccagagacctctaaaccaagcacaaacaagaagggagtgagagaacccaggctagaacttgcacgggcatcccactgaggaaaagcgaggcctcggtggcaggcatgttttcttccgacgcccgaaaatcgagccgagcgcccgactacatttactgcagaggtttccgcctccagtgagcccggatcccccagcggcctgcccggagctggtctccagtccccgccgtagtccgacgcacggccctctcctggcagcaagctcccagcggccagtctgaagccaattctgttcaggcggccgagggcccttagccaacccaccatgatgtcgcctgggccacctgatgcccgcagcggcgggacacggcccgggcagtgcgcagtggctcctgctaggggcaccgcgtgcgtgcttgtctcccgctgcgccggggacgtccttgggtgacacgggccgctgggcacctcccaagccgaggaaacggacccccttcgcagagtctcgcgcccaccccccaacctcccacctcgtttctcgctgctagggctcccgactcagcccacctctcctggcggtttagttagggatcagagctggagaggctgaacgcaacccgtgccagtacggaacagacgatatgtttgcctgctagctgcttggatgaataattgaaaagttcgctgcagtctgtgcttcgtcaagtcccgggtgccgggagaacaccttcccaacacgcatcagggtgggcgggagcgggcagaggaggcgggacccgagggaggagagtgaacccgagcaggagaagcagcccaggcagccaggcgccctcgatgcgagaggctgggcatttatttttattccaggctttccactgtgtggttatgtcactttctcaaacaaatgtgtatatggagggagatcgatgctgataatgtttagaagattaaaagagcattaatgctggcaacaataacgtaaacgtgtggacccagatttcattgatctggaacttgatccggcgcgtttccagtaagcccgacggcgcgctcttcccagcagagcgctcaccagcgccacggccccgcggttttccagcggtgccgcttcgccagctctgcgcgggttctcccgtctgaccgcagctcctcccccgcgaggccccagcccgccttacttccccgaggttttctcctcctctcgcggggctctctgccctctgcaccccctcccccgacctctgcaccacccgcccctgtgcgcacacaccgctacttgcgcttccggcgatccgcctgggcggctgggtccgcgaagccaatgcgctgaacggtgcccg

SEQ ID NO: 21 - DNA, 2473 bp, Homo Sapiens
ggacatccctgcgcgtgcacgaacgcatttgcacgcgcgctagtccttcagtgcgggtgcacccttcccacctcctcaggcatgcgctgcgggggaagggccggctcaaaggcatgagttagaggaaggactgtatgccgtgaaggtctcctccaccccacgctgggtccctgcatctgtgcctcagttttcctgccgaatctatcaatgagatgtctctcttgcagggatcggcttcgtcactgagacctcaggcctctgccagccactccccctccccatacccctagtcatcctcggcaggtctcagtcccggctccatctgtgccctcgccccagccgcagctatgttgcacaccgagggccacgctcttcttcgggcggtgggtcagggtaagctacgcttggcccgtttgcttctggagggaggcgcctacgtgaatgagggtgatgcgcagggggagactgcgctaatggcagcctgtcgggcccgctacgacgacccccagaacaaggcacgcatggtacgctacctcctggagcaaggcgcggaccccaatatcgcagaccgattagggcgcacggcgctcatgcacgcttgcgccgggggtgggggcgccgcggtggcctcgctgctccttgcccacggcgcagacccctcagtccgagatcacgcgggcgcctcggctcttgtccacgccctggaccgcggggaccgcgagacccttgccacactgctggacgcctgcaaggccaagggtacggaggtcatcatcatcaccaccgatacctcgccctcaggcaccaagaagacccggcagtatctcaattctccaccatccccaggggtggaggaccctgctcccgcctctcctagcccggggttctgcacgtcgccttcggaaatccaactgcagaccgctggaggaggagggcgtgggatgttatcccctcgcgcccaggaagaagaggagaagcgggacgtatttgaattccctcttcctaagccccccgatgacccatccccttccgagccgctccccaaaccaccacgccatcccccaaaaccactcaaaaggctcaactccgagccctggggcctagtggcccctcctcaaccagtcccacccactgaagggagaccggggatcgagcgcttgactgccgaattcaatggcctgaccctgaccggtcgaccccgtctttcccgacgtcacagcaccgaaggccctgaggacccgcccccatgggcggagaaagtgactagcgggggtcctctctctcgccgaaacacagcaccagaagctcaggagtctggtcccccttcagggctgaggcagaaactgagccgcatggagccagtggagctggacacccctggacacctttgccctgactcgcctgagtccagccgcctgtccctggagcgccgccgatacagcgcctccccgttgaccctccctccagccggctcggctccctctccgcgccagtcccaggagagtctgccaggggcagtatctccgctaagcggaaggaggcggagtccggggctgctggagcggaggggctcggggacgttgctcctggaccacatctcgcaaacgcggccgggtttcctaccccctctcaacgtcagtccccaccctcccatccctgacattcgcccacaacccggaggtcgggcgccttcgttgcctgcccctccttatgccggggcgccaggctctcccaggaccaagcgcaaattggtgagacgccactccatgcagactgagcagatccgcctgctggggggcttccagagtctaggtgggcctggggagccagggcgctgagaggagtgagaggagccaaggagggtggggattaggaccttaatgggataggtgggagaaccagctcacacacacaccacgaacaaagggatctcttgcatgtgctcatgggtgcacagtgcacccacacatggttaaacatgtgtccataagcacagtactcttattagcaagaaagaataagtactctatttactgggtatatacacacatgtattcatgccctggtcatttcacatgcatatgggattacttgtgtacctacaggcacagcatatcaataaacacacagggctagggtcccaaactctcttgcatttgttcagaagcagtagggaacccttacttatgggcagtctccgatgtctttgccctcctgcagaagcaatcccttgctttccatgtatgccctgaaacacagcctatcatgattttgcacactctctccgtggacatcccagcccattctgcaggtcttgcttctttctccaggcctggctccttattcacaccctgcttctaaccccaaccacttttcaggatatctttttcactcttcttgggggttcctgcagcaacccccagcctcagttctgctgctgtctttactgctctcaacttcacttctcaacttc

SEQ ID NO: 22 - DNA, 2425 bp, Homo Sapiens
gttcagctggaactagttaatctgtaaacatagtttccatttcaaaaattgtgaaatgatgcctttttaaatggaaaaagcattaaggagaagaaaactgattcagttacagggtctttgggggaaaatttctagcaccaccctctctcctaattacagtaaaacatggtgggatataagaaccaaatatttattgagtattttctctgcgcctatcacaactctattttaactcctgtaaatgtgactgtgactccgtgagctagattatagaattcctgttgacagttataattggtaggcacagaaagcgtaaagatggagtttggaatggaatctggcctgtctgactctaagccctggatccactgtaatacattataactgctagctttgcaaaatgcctttttccttttctcatctattttcacactcaaactaaaatttagtaaactaaattctgagcagcagaaaaaattttagtaaaggtcctctcatccttgaagaacttcttatataaggatactccttcttgctccctttcccacgcagaactttaccaaaggtcagtaagaatgggctgttgtgttttctctcaaatcctatacagaagtccttaattccgaggtaaacatctgaatggaacaaatgagtatgatctgggggttaaggcaattttcaagtgtgtgtatgtgtgtgtctgttttaaggcataacaaagtccagagattaaggccgagttaaaaaacaaatgaggacaaaccaatgaggacaaaccagtccgctgaggtgcggccagagcagcagcaactgtggctgctttcttgataaaggctgtgaagacggcacgttttactcttattcgtgtatttcttttgacactttacccctctatgaagcctcagaggtgttttaaaattgtgttaggaaacacacagagataagaaaaggcaaatggtcctgatctagtgtctcagggaagaggctggaaaggaaacgcggcgcgagtggggtgggagagggggcctgtggttttgcttctgtccgggctgaagactgagtaaggtagggcccctccttctgcggatgggtttctctctcattccaccctccacccacctccggttccgcgtgcacgcgcgagatagtccagtgggcccacagataacgaccatcagagattaaagaaggaaagtcagcgagcttgaacacaggcgtcccgtgtggaaatgtccaaggagaccgccagaagtgcgcaagccggagtcggctagagtttccttctcaccgagagggggagcccggcgttcccggccgggagcgacccggagtccccagccccgcgtcccagctgccgccagcgccagttttggattcggcggattaggaagaggagggaggggggagagagcgcgaagagggaggggaccgaagctggagggtcccgagtccagcgccgtgttggcgtagagaaactttccctctcggcctcggagacggcgccccggccgtgccggagtggagatcgccaggctcggaggaaccggcagctctccacgcccctgcccgaagcctgacccgactgcctctctcagtgaggtacggagatttatctaggctcttccctggctgcgaacccaggctccctccaggtagcgtggaatcgcttagaagctgatatcccgaggggcggtgggggtggacagctccggccaccagtgcccgggaaggagggcgcggggctgcgcgtagccgctggccagcaggttgtaaaaaattaggacagctaaatgctcagggagtcgtccagcactaaaggaggctaagacctgttgacgcctgctatggcagcgcttgagaaatgactgggggagtccagcgaggtcggggacgcagcggtctccgggctccagaaacctccttagccttttgtggtaactttggtccggcggcggggggccggtgagcaggaactggagggaggcggtggggaaaccgtggatccgtccggctgagggtgcgtggatcagactgggctgagcaggcaagtcatcgtcgggtcacagcgaggcgacccaggagcgaacttccagggcagcctcccttttgttggcgctgggagagaatgtgggcatgggggtggggaggcgcgaagctccgaggccgggccgcggatactttaaagctcagagctgggagggcccaaaggaaggggcggcgtccacatggttacccttctgctgcgcgggtcaagtagcttcttctggagggcgcaaggcgcggcgggggtgatgagcccttgggttctcgctccgactgctaaattcgcttggccgggtccaccttctcgtggcctcactcgccacacggatcagaatccggagcaggcagttctctctattctgaggctcctgcggctgccgcg

SEQ ID NO: 23 - DNA, 3954 bp, Homo Sapiens
gggccgcagccggagaggaacaggaaccgcagtggggacgccctggtccccgggcccacagcatccgggacggacgcgcagtagcgcgggccgggaactgggtaccagggcgggatgggtgagaggctctaagggacaaggcagggagaagcgcagcggggtgcggggaaccgcacgccctccctttgcctctgcttcccaccccgaggcggcagggcgggcgggcgcggttccgggggtgggcgggctgggcggggcggaggcggggccgcagcactggcttcacccagcctctcccgcccgcagccagagcgagccgagccgcggccagctccggcgggcagggggggcgctggagcgcagcgcagcgcagccccatcagtccgcaaagcggaccgagctggaagtcgagcgctgccgcgggaggcgggcgatgggggcaggtgccaccggccgcgccatggacgggccgcgcctgctgctgttgctgcttctgggggtgagtgttagccggagggggcccgctccctttcccgggatcagaactccgagaagagccgggcgccgccaccaaggaaacagaacagagcattggggtcccagatactgagggtgggtggtgggaaaggacctctgatgccgggaccacgaaggagggtctagggttcccggagcgcagaggcgactctccagggtggagatgagggcaagaccggagcacggatgccggtcctcaggtaccgcagggggcggtgggggagctgggaggggtctttcaagagggggcatggggctctccgatgcccaggttcttcggaagaggacactcgaatgccgggatcccgaagggactttcccctcagcatctcggtctctggagagtcgtgggacagaaccaaggcgagagaaggagggggaactggacggggactagagatgagaggggcgagctgggctggggcggggagcccgggacgacgggatggaacaatggaggaggtcggagggactggaggcagaggggacccggcaaggacaatggggaccggccagacaatgggggggaggggcgtcggagggagaggttggggagcgggagagaggttgagaagtgggttagggagggcagaagaggggcgacggcgagggcggcagagagatggaagcagaaggaaaggagacagagcggggcgcggaccctgaagtggtcggggtcccgcctgcccgctgagggacagtgagacgagaagagagagcagaggcttggacatttccagcgcctgtccccgcgctcctgctcgcggcctctcccagtcccggaattggggctgcggatctaaggctgggaggggagtgcccacttcgccggggcgaacccgctcccggggttcccccacggccggcgggctcctccgacgcgcgtgttctcacggcttgaagcagcgcagcggatcgcgagggacggagcgggtgtgcccctacccgggctggcggtggctacgtctcggggtgcagagcgccggggcgcactaggcggggacccttcctggccgcgcgcagctctggctacgcaggcgggaggcggcaggcagggggcgctgcggggcgaggcaagtgcagtccgccgctgcctgcctgcgagtctggggctgcgcgccgctccccacctagctgcgcgacccgagcgccgcgcccaccgcgctccgtgggctcccgcgcctcgaagggtcgggatccggtctgagcctctcctggctctcggtgcaagccgctgggcacctaacgagacgggggcgcccggacgcctcggattctgtagcgcggtatcccgggccaccgactcggcaaaggtcggcgggtcctccgggtggtccgacgagattgtcagatgtggcctgctttatggccatgaaccgaatgccctggaaggtctggcaacggaggaggcgtcttcactctccccgccagcatctttcatcagagcactgcgccccaaattccggctttacagatacggagactgaggctctgagagtttaaacgacttggccaagatctcacagcaagttgggccagagtcgtggctagactccccgacctgattcccagctcggtactcccccaccttttcagggggcagccgctgtcccagctcggggtcacggctgcgtttcccagcagggcggggggggttgacactgtccccagagtccgtcggcggtagagcctgcgggtgaggtgggcagagattctgtccgggtgcgggccccagcccgaaagctcagccccagttccctggagctgtcaggacctgtggctgcgtccggggatttgggagcgaccgcgggcacgtctgctgactaacgccgctggttagagacgctgctcagacgcgggtgggcgagcgtagaccaggagagcggggaggagggaccggatcccagaggggcaacgacttgggctccgggtctgggcaagagcgagggtccccgcgcgaagacccaaggaaggaggggagctgggcgtggaggacctgggcgcttgggaaggtgtaccccgacaggaacctgccgtctgcagcccctgcggctcccgcctccgcctcggcgcgcggctgctcggtctgggatggctgtgcgcggtccgagtttcttcctgggccgcggtgagagagagagggctgaaaccagagcgcgtcccggcgggtcggctggcgggccgcgccggtaatggaggcactttgtcattcagacgtctgtaaccagagccgccgggctggctaatgcgcctaatagggatggaacgagggcagcaaatgggcgtgcgtgagcggccgggctgagctgggtggatggtggatggggaggcagctccgcgggggacgggcccctaccgcactgttccagcccagtctggctcaagcgcctcgcttcttccctgggggaccgcgtggggaggcgggaataatcgcatgtgctgagttcctactaagtgccttgcacttccctggtagtttctcttgaattatttaatccttataaggtcctagcaaggtgaatttagttattcccacttcgcagttgaggaaacagaaccttctagactttcaggcccgagaccaggctcccccagtgagtcagtggtggcgtctttgttggaacccaggatgcttggcctgggatgttctctttcctacatatgccaggctccctcccgccccctaccttctagatcatggaaggagtcgtggctctgagagattaaatcgtgccctatgcctttggccccacacatttagatctgagccccttctccacacgcagaggccctgccccctctcaagtctctatgctacattatcttgggtaattagctcctttcctcccaactcctcccctatccaaagggagtgaggggtatgtgccagtgcctcccctgggtttgcatcgacctcaaaaggccctccaggtgtttgaaaatctctcccatcccatggcggtgaccacggccccattcacttaagagctctttgctgaagctgttggaatggccagggctgattatactgaaacattcgtatggtttcaaatactttcaactgtttcgctgtttctctcttttctctaattaaaaaaaatgaaaattcttaaaagtcaattcatctaaggatccttccaccttagttccttgtaagccttgaaatggccaaaacaaaaagattacaagcgttcttaaaaatgagatgaaatcattctgtcaaatgtgaaatgactaagtgtaacacatacaaatttcagggaaatttatctgtcatccctataaattaatccttttggatctgattttggagcaattagcctgaatgttagtcacccctccctacttggctaaactctcccctcctgcctggggtctccttaagatgagatgcttctttgataactaacatttatt

SEQ ID NO: 24 - DNA, 2821 bp, Homo Sapiens
cctaggggacaatacccaggcatgttaacggagtttaaaatgccaaggaaattacaccacaattctgcccagtatactacaggctgtcaaaccgaaatgctatgccagctaggagtgcagcaactcccatcctctggccctatttaattaggaagcttcagcagagcgaagcctgccaagcgttcgccgtcagaatctgaaggaacccgagcgagcaagaagagtgcctgacccactccacagaagcctgtccagaaatggaggagtcagcgcccactgaagtcggttccgccctcggctcgcctacatggagcctgaccagcctcagtcatgcccactccggcctgggagacccgcaaagtgttctttttctcaactcccctgtactaccttgaagcttagggaagcaaagagaggggcatatctggactgcaaaaccaatgtcttttgccgcctaggagagaagggaatgagagagagagagagatagatagatagagagagagagagagagagagagagagagagagagagagagagagaaattctattgaaacccagctcctctagaatctgtgtgacctggtcttcaacgggagaccagtgcgacctcatggcacctttgccaggaatcagcgattcccctgcagtcaccatttgatttattgctttctcgctcattctttctcataaagttatttcttcctcatcctagtaagacttttttctttaatgatgacaaagcttctgtttcagtgtttcccctaggattggtgctctttcaaaacagtgaacccagaaaaccatcccgtttaatatttctcaaaatcctcgcagctccaatgtaagcgcaagcatgcaaaggtttcctgctacacctgcactttctgcccatcccagaaccacccctcacccccgggcctgcaacagttccccttgtttctctggatagaggtgggtggtattaggggtctagggcagtaggaggtgaggggctgaggaggcgcgctagggtaggctggtctgtgctggatacgcgtgttcttctgcggagttaaagggtcggggacgggggttctggacttaccagagcaattccagccggtgggcgtttggcagtcacttaaggaggtagggaaagcagcgagcttcaccgggcgggctacgatgagtagcatgacgggcagcagcagcagccagcaaaagccctcgcaaagtgtccagctgctgcactgccgcggggactcccacagcaccatgactagttcgtgcaactctgcagcagcaaacggcttccgaggaacacaggatcgcgggggccgggcagcgggctactgagcatcccgcggacggcggcagcagaggcggcggcggtggcagtggcacccggcggggaagcagcagccaaacccgcgcatgatctcgagagtttcagcaacatccagggactgggctcagccccggagcgagagggtcgtccgctgagaagctgcgccggagacgcgggaagctgctgccataaggagggagctctgggaagccggaggacaggaggagacgggagtccaggggcagacgagtggagcccgaggaggcagggtggagggagagtcaaggcgccccgcagcccggcagccgcctctcgagctctgccgcccgcatccctctggcgtttgggaagcagcaggtcctcagcccgcccggggtcacgtgggaagaggcagtcgggctctgattggtggagcaggatgcaggtcccgggagggaggggtcgacgaggaggtgcaaggatgcaaggaggaggcggccgcggaagccacagatgggctcgctcgccaggcgctggcccgagtggggctaggcggggatggctcaaatgagaagctcgggcttcagggtgggctacccgcacactcatataccattcgcctcactctccgctccaggacgccccctaccgaaggcggggtccggactagcgcccctcttccgcgcgtgaccccgggccgcgagtgcgggccgcggctgggtggcgtctctccgagctggagatggtgggggcggaggtgtcagaggagcagcagcagcagggcagagaggggcgagtcggcgcgggagagggcgtcctgctggcgaccggcgctccagcgtgcgggagcgcgccgcctaggctgtagggggatgcaggctgggaatgtcgcggcggagaggccagggacgtttctctagggatttacaggaaagagggtgagaggcgatggtgttagaaccgctcttgccgacctggaagcaacagcagcatctcccacaagagcgtgcaaccccaaggctgctcgccgaggcagctcagccatcccggcaggcgctctccttccttctctcttctcccctctctcctcccaggccccccgcagctccgacccagcccaagcgttcgcaggtttgaatccctctcctcatcacccgctcctctccagcccgtagcctattagtgtgtccacctgggaggtgcggtcagatgtgtttggaaggtcagattggtcgggacaagtggtctgagagaaagagaaaggctcctctgcatacgccgcgggtgggttgccgggagcatcggccgggcagcggcgtccgggaaggggagagcgggctccatttgttggcccaggcagtgaccctgcgttccttactcgggtctttgccggatggccggtgacctggggcgacgagagaaggtctaactcggcaggagtctctggctctgcgcgtttctttcattctctccagcgggaagggcaaacggcatagcgggacccgccttccg

SEQ ID NO: 25 - DNA, 2818 bp, Homo Sapiens
gaggtgggggcgtcaacgacaggcgctcagtaagtgctcctgaggcaactgccgggctgtcctggacctggtgaatcctttcggggttcagcaaaggcggacgctgaccgggccaaggagtgggacctgcagtgctggaccacccttttccaagcgcagaagtgccgtgcccgccggctctcaacagggcaagaggcccctctcgccgtgcagagcgcagcgcttgcggcggggacagcagaggcgggacgggcgtcacggagttcccgggtcctcgcgcggtcacttacctggcctcagctatccgctgaaaaaggggcggacggcctcccgggatccgagccgatatcgcgcgcggcgccgcggggcaacctgaagccgtgtgcgtgcgtgtgcgttcacgcaggggctcacccagcggccacgggcttctgaagacccgggtgggaagtgcggcccgggaaagcgcaagcgtctccatggcaacgagggcggacggcgtcagagcgagtcgcttccggaagtgacgtgcggaaggggtgcccgggacgaagccatggccctggaggcggcgggagggccgccggaggaaacgctgtcactgtggaaacggtaatgctgtcaggcgacgcgcaggaggcgggggccgaggccgggcggcccttcgcggaccctccgagctcatagtcttcaggctgtggaatcggagctgccaccgcccgagactccaaagcaaagcccagtttccggcgcggaagcggagggatctcaggaattgtagtccgcggggtgggcgcggttctcgcttccggccagtttgtctggcctgcgcttgcgcgggtctccgccgcctgggctcctagggactgtggcctcggcggtatgtcccttgctttcccttgaagcgggagaagacccggcagaggcgctctgtccgctgcagccgcgcgggtggaggaggcagagtctgaggtgtgaccccgaccaagtttgacgcttctgtcctcctagggagcaagctcggctgaaggcccacgtcgtagaccgggacaccgaggcgtggcagcgagaccccgccttctcgggtctgcagagggtcgggggcgttgacgtgtccttcgtgaaaggggacagtgtccgcgcttgtgcttccctggtggtgctcagcttccctgagctcgaggtaacctgggaggacgccgagctcgaggcgggcccctcggtgggctcgggcgtgcggtctccgggacagggagcagtgcaagcgtagaacccggcttctcgttttgtaggatgtcattaatagtctggggagttggccgggcgcggtggctcacgcctgcaatcccagcactttgggaggctgaggcgggggaatcacctgaggtcgggagttcgagaccagcctgaccaacatggagaaacccggtctctactaaaaatacaaaattagacgggtgtggtggcatatacctgtaatcccagctactcggaaggctgaggcgggagaatcgcttgaacccgggaggcggaggttgcggtgagccaacatcacgccattgcactccagcctcggcaacaagagcgaaactccatctcaaaaaaaaaaaaaaaaaaaaaaagtctggggagtcttggaagggaaaaaaaggcaaaaattaagggaattctgtgactattaagaatcagctcatgagctttatcttcaagtctgattgttatcttgggttcttcatctcagtgacctgtccaccacgctcccagttgcccaagctggagatctgcatcctcctgggcccctccgttcctctcgcgtccagttgcacactagctcgcttttattctgcctcttaaatgtcgctggaatctgtccccttgtctgtttcccctctgctccttccctggctgtgccaccatcactcctgtgggttcctgagcagcattttcatgggtgccctggctcaaatgttcctcctcagtggtttcttttccatactgccagcagaccaattttcctaaaaagcaagtattttcctcaaaagcaacaagtcccctccctccctccctccctcccttccttccttccttccttcctcccttccttcctctctctgtctctctttccttcctttccccttcccccactctgtgcccaggctgaagtgcagtggcataatcttggctcactgtcaagatctgatctcaacctcctggactcaagtgatcctcccaccttagcctgagtagctaggaccacaggtgtgagccactacacccggcttatttttttattttttgtagagacaggatctcactatgttgcccagggtggtctccagctcctgggctcaagggatcctcctaccttggcctccccaagtgctgagattacaggtgggaaccaccacacccagcccacaagtcctcttagaacattgaagtgcccttctcatgacctcatggtgaataaagttcactctggttggcatggcttcaaggcccgtcatgacctgtcccctgcgtaatttaatatgacgctggaggctcagccctcaccactattctcagttcttcccacctcctacagcccactgtgagtccctcacgtgtttgctacgctgtatttggcggcctgacctttgcagtaatgtttcttctggaagggtttccatctggctaactactactcatctctttgggctcagtttagacatgacgtcctccactaagctccctctcatcccacaagacgaggacttgtccctcagcaccatgtcttagtccgtttgggctgctgtaatagaataccttagactgg

SEQ ID NO: 26 - DNA, 2308 bp, Homo Sapiens
taagggctaagcaatgatgcataaacggggtccactgcccaaacttacagaaagcaaaacgtggaaaattagtaactttaactgatagtgtacacctaaagaacctacaccggccgggcgcggtggctcacgcctgtaatcccagcactttgggaggccgaggcgggaggatcatttgaggtcaagagatcgagaccagcctgaccaacatggtgaaaccccgtccctactgaaaacacaaaaaaattagccaggcgtggtggcacatgcctgtagtttcagctactcgggagggtgaggcaggagaactgcttgaacccaggagacagaggttgcagtgagccgagatcgcgccactgcactcgtctgggagacagagcgagactccgtctcaaaacaaaaaacaaacaaaaagaacccacccaacagaattaagtaccaacataataaatacgaagaattttagattcttggtttttaaaaaacatacaaagatgatattccttcaaaatatctttacaaaacatattgagactgtgatgctttatattgattgtatgaaaacaatgaaaaagaaccagcactgtttcactataaaagctttactaatgtaaatttataaatcctttcttaaatattttgagttaattctaattttatgatagaaattcattattttcagcaaaaacagctggcatttgggaaaccaaaggctcaaaaactaagaatagtaaccaaagaaacttgacaaaacagtccttttaaaactctcatctacactataaggggaaactttgatcacgtcccttctccttcatcaatcgtagaactcaacattaaggactacacaatcccacatccctctccgagaaaaagcaaaggctttgtgttgtagcaacaacgcaagacatggagggaagctccactcaagacttccctgcctgctccttccccaaagccactccagaataccagggagggttgagaggtaaggcatgaagggcgcaatatccaatatgagcaacgcgtgtgatgcatctggtcaaaatgcatacagaggacttgtctctgtccctagatagaagtcctccgtcctgcagtcatgagggtcaattgctgaggcttcacagttcccttctctcttacactcggaccgtcacgctcctcacctactaccccgatgcagaggtagactcaggatccctgcacttgtcaaggattcctcggcaagctcacggggcgggagtggccacaagacggagctcgcctggtcctggccttcccggcctatacaagcctgcccccttcccaattcccaatctccacagccttccatcctcccactttcgattcaccttgcgccaccgacgcccctggccttcgtttgcagcaagtttacccccaccattacctctcgcataaaagcctgcatttaccaggtcaaagaggggaaccaacgcctgcaggaatcgcttcaccgaatcgcctggccgcgtcctctgctagacttcacctgccgctgcggaccgtacacaaccactcccggcatgccccgcgcacgcactacctctcccaccccgcccctctcccgcccaaacacgtgacctcctttcgtctccgtccacgcccacttccgttcctccactttcccttaggaaggaggagggagctgggggtgttaaaagcgtagcgacttcctcctcctccccgcccccgctcctgtacctcccgctacaatgtcttccgggtcgctagcgcctcgacgccttctgggaaaatagctcatttcctcccctccccctcctcctgccttcaaccaaccagccacccgtcagagagggacatgcgcagtgagtgcctcccgtctcttctacccgaaccccccctcccccccaagcagagagaccccagcagcagcagcagctgatgatgaagagagaggcagtggcagagggggggcaccttttatttctatttttaaagggacaggacactaattctaccccacttcaaccttgaattcaggggggtggggggaaggcggctgagttccttcccccaccctccagccctgagccctgagagggggattgagcctgagagaggagaaggagtttcttcttcttcgaaaacccccatccacgactcctaccccctcacccctccaactcgcctccctccctccaccctcctcctctttggccgtgagaggaggagagaaagaaaccaaaagcctcttagcaacacagaccctttgctgctgctgttgctgctgctgctgctgttgctgctgctgctgctactgctg

SEQ ID NO: 27 - DNA, 2441 bp, Homo Sapiens
ctgacatggtcttgatgctagaggagaaacatggcttgggggtccctgtcaacccaggccctctaggcccctaccatcgtggggctcctggcaccacgctctccagcacttttgatgttggctttgattcggaaacgctgcgtgtgctcaggtttttggtggagagagaagcagcccctgagggatttgcctctgagagggtttcacctagggagtgatcgatgctcaggcgtggctaggtttattgtcccttgtttttgcccctccctgtttgtgttctggtggctgaggatccagtaggtccctccatgtttgtccctcttatgctgagtgagctgggcggccggggtccgaggtgtgaccaggcagctctgacctccacatgccccagaagggctggcacccagccagggagccgccgtcctctctgcatggagcaaaagcaaacgctcctcctcacctgccaggttcctgttggagccccttccacgtagtgacagaaagagccaccgtgggtgttctctccagcgagtgcctaaagatgatggtggggtgggtgggtctggggctgactcttctccccagccctcttgaggggttcatggttggtgataagtgagcggcggtgcctgggcaccggctggctgggggactttgaccagtgtggcttcaggatctccaccctgcacccagcctgcattaggcagcgttcagctgccctcacgtccaccttggccaaatctgttgccccaggtgacccagactgcggggggacaggcaatggggatgagattgggctccacagcctccccactgcagcagcacagctcccgggagctgccgagacgcacacatggcccacccagacccgagtcaaccctcacttaggacagtcccgagattcacgtcccccggaagcttgtgaagttctgcgccacggtgtggcaagaggacagccagtcagacctgtccagcccactccagggccgcgtgggggtggtagttgtaaaacatatgatttttatcttgacagtgtccctttaaaaaatcaaagccgcaccccgcctccctggccagcaagaaacctaaaagggaaacagtaagtgtctggtcctccggctacgtttttttgcccccgccctcatttttaaacccacgacaagtaggggagatcgtttccgccccaggctagtgtctgattcatataacccgtcagctccacttgcccagtcccggcctccctgcccagggagtttgtggaaccggaaaagctctcggtccgtgggcgaaacgccaggtgcgctggccccgccgccctcccctcagctttgcctccgccccgcgtggcccccgtgccgtttcccttttttttcttgctggcagtggaatggacgttgcaggcggaactaacgtcgctgctgcgttttgcaatcgcgccccgcgcatgcttcttggccccgtgtcccgctcctttaccctgcgggttcgagctccttgggctgagctttttggtttccttgggcttcccttgtgccccagggagcaggcagggggaccagcacacaaccacctggagcctccgtggcccaggcagacccagccgaaaccctgtgtgcgttggtgtagaaggtggaggccactccggagccacccggaccgtgttttcctttctagaggggtgaggggattctgtgtggttatttacccttaacttggaggcaggtatgggagcaaatgtggggtacacagaggtccagaaaagcatcccgggctcattgcccgggccgtgcccgctcccccatttctcccccacctccccgtggtctccaggcatcccgcacccatctcactttccccttccttccaggagctcggtcaggcaggccggggtctcccgaaaggagcactgacgagcgttgtgcccctcaacctggttttgtggggacagagcaggggcccccgcagtctgacttccgttccccagaacctgggcattttccttcttcctcagccttgttgattctgtctgctcccagtgagggaagaacagtggctcttagccagggtgcccgttagaaccacctggagcaggtcagcccccagaggcccgggcagggcacagctcccaacagctcagctctccctggtccaggacgcccctgaccgtgtctctcgcctctggcatggctttgctctgcccccgctcccagctcctgtctgtcactaacccttcactctccacctggggccaggcgggactgaaagccagggaggggctggttgaggccagggctggggcggttcttggcagatgccctcgtgcccgtcatcccaggcaccagcgtgggcatttgggcatccagccccgtgctggagctgatggctgaggcagggagggcatcggtgctgccagggagctcttggccaccctctgagggtgg

SEQ ID NO: 28 - DNA, 2818 bp, Homo Sapiens; identical to SEQ ID NO: 25

SEQ ID NO: 29 - DNA, 2476 bp, Homo Sapiens
aattactaggaggctgggggaaaagaggggaaaaacgggtaaggaaggttgcaaatgttaagatgccaaacaggaacccaaccgaagtccgaagtgaaatacagcctcctctggcccaactgtcatgcaaacaacttctaagcatcttcagatgtaaagaaaaacagtcattgtgcacaggcgttagctgaatgttcgagagttggatgaatggggaagacttgttatacacctagtggtgggtggatttcactaggctgcagcctccacacagcttttctttgctgcactgcagaggcgccatcttctccgtcttaatcttcactcaattcgatccttttatctgcaccctaaaaaaaagacccttcggaccctccccagcatcctgtgcccccaggggaactaaaccagagtccccagagctgccagggaagaggccgcgccttaatcagacaaacgcctccttggatgcacaggacagagcccgtgcctccccaccatccgccactgccctttccagacgcacatcccactctccgccttatttcctccccgccaaggactttacagcccagcacagaattaagcctcggaggtgatccgagggtgggaagcagaggggccccgaggctccgccagaagccccggcagcgtctctgccccctcccaggcggacgcgcagccccgggaagggagccgggcgggagcctcggtggcgcactgagactaacgcggctcggcccacggcgagggcggggtgtcgcggcttttgttcccgcggaccttctgcctctcagacagagcttagggtgcgagcgaactcccgggacgtccagacttggggaaggcgcggggtggctatgggtctccgacccctcccatttctcgcaagttacacaaaagggagacgcggacatgcacaaagtttgcctgtggaaggcggtgcgcgaccccgacgccggctcgggctagggtcgcacccaggctgccgccgccagcagccgcgaaaagaggttggagcaaggaagggggatgggggtgagagaggaaggtgaaacgaggcggagaacgcagggaaaagcgaggggctcctagcttcctgggctgtcccgactcctcctcctcctccccagggcccaagagaaaggaaagggcaacgattcaagagcgaaggactggctttagggacgctgcgttttcggttttccccacgtgctccttcccccttcccccctgtctgaatgtctctcgcctcccccgacccccgcttccaaggcagggactaagtcggggtctgggctcagggtcgccccctacccttctcgccccgggctggcgcggaaccagggagaccagcgcctcgcccgctccctctcagcgggccggagcgcgactccctggggcagggctgggccgaaagcggggatgcgctggacgtccgcaagcgggggcggagaggagaggggtcccattgacggacccccggcttctctgcattaaagacttgggttaaggtcttggggggtatcgcgtccccaccgtgcagcctccccccgccttccgaggcgcggcacccacctccagcgcccgagccgtccaggcggccagcaggagcagtgccaaaccgggcagcatcgcgaccctgcgcggggcaccgagtgcgctgctgtgcgagtgggatccgccgcgtccttgctctgcccgcgccgccaccgccgccgtctcccggggcccccgcgcacgctcctccgcgtgctctcgcctaccgctgccgaggaaactgacggagcccgagcgcggcggcggggctcagagccaggcgagtcagctgatccggcccaccccgctcggcacccgagagagacccctagcggcgccgccggggaactgcgcccgctcgcgccgggaggggccctcgcgccccgcgcccacaggtgcacgcgcccttggcgccgcctgcaccccacgcgccccctccgctccccggccgacggcccacctgggcttcgtgaacagtgggagggagagtctggggccaggagagggacggtgcaggatcagggaaaggtgagtcctaggacgctgaggctctagaaaagtcgagagcgctcctgctcgtccccgtgagcttgaatcatccgaccccgcaggcctcccgggggtgtcgtataaaggactgctgctagggtgcgtttttatccgcatttcgttttttctctcggtttggagaggtggggcaggcgtttctggaagagaatgagaacgagtgaagcttaaaggaaataggattttctttgcttgttgagacagcaaaacctcattttttaacccccaacgtcaaaagcaggcacgagcaacctggaatttctatctttagaacgaaccaaaggagcaaggcgcaggacctggcaaagaagcggccaacccatttacttcttcttgaaagcagggttctgggcttgggttttgtttcttt

SEQ ID NO: 30 - DNA, 2265 bp, Homo Sapiens
cacccccacccagcgtgctcagggcacccgcaccgtgctagcttgtggcggctctcaaactaatcctgactgagtttttgaggcagccttctattcccactcgcaccaacccagcacgcttaccaaaattcccaagtaaccttctctttgttacgcaaacgccaggagctgcttgattctttcttctctccacccctatcccctttccagcctagccggcttcctggccgggcaagctgggaattcagcgactgaagggccttggaaggtgccggaggggagagacgctagttcgaacctccacagggctctcctactaaaaatccctaaaatgctggcccgagaaactctctttgttggagggtctgagtcctactcccttctgccgcgtgcgcccccactgccgtgaaccgctgtgacccccaatctaccaccccatctcgcgcccccagcgtcctagtcgccctgtatctgcccagccttccccctgtccatgtacctggctggttggtggcgcttgggacgcggttgtaggcgccgccgtactggtggtaggagctagcgtagctatagtcggcataagctttggctgggtagctcccggcggagccgttcacgccgtgatactgatactggtaggggttgagagctttgccataggaagccgaggtaggagagcagtagccgtgcggggctccccccgtagggctgtagtagtcagaatcggtagctgaagactcgggcaaagttggcgattcctgagacggatggtgcatagctgcggacgtctggaacggagcttggaagtcgccggatcggatgctggggacccttctgtcaaacactcctgtcatcgctcacgggcggcggcagcggctgtccttgctgttgtggcggcggcagctgccctagttggctgtggggctgctctggtctaagcagacatggctgtgggagcgagggaggaggaggaagaggaggaggagagaaggaggaggcggcggccgcggcgaggaggagactgggagtcgtgaagtctctgtctccggccggctgactgctggctgaggcgcagcacagccttggttaaatccttaattgcgcgcttacgcacagcggggtggatctggttctattggccagggcctcgggagcaacagtaacaccctaactcgtccaactagttttagcacaacaaagcattgcttaaaaagggggtggggggtactgagggggtgtgtgtgtttgtgtgtgtgcgcgcccgcgcgcttgtgtgtgtttttgcttgttgtggagtggggaggggtcttagtctatctgtttttagtaaattccaaagacatcgcagaagccacagcacaaggctctgtgatgtctggggacaatgtgttccaatcagaagcctcaaaagtgcacatgttttgggaatgaggtgggcgaccatctttccttgcttcccactaccccgcccccgtgggctgcaccaaaggcgagtgtagaattaaacactgatactgaaatagggagtcaaggtgcagggagtggggagcggggggatgtaggatggaggcaagaaggaagggaaacagcattttttttttttttagtggagtgttgggaagcaagttgtaacttacatgttttgaaaatttgctctttggggaaagaggcaacttcctttgcaggagatgagtatctcccggacgcgggctggacaggaatgcccaagaaggcacaatgtccattaagccggtgaatggcagggagagttcctgcagcccaaagtccttataatgacttttaaaaattactgtcttaaacacatataacttaaggaagcccaaatcctcgttgctggcttgcaaaaagagccaaacagctccacttctgtttaatattttcatctattttcaagacattggaataaaggctctttaactatgttcagtggccaaagactcccgcaaaggtgaatggatccatgtataacctgccatacctccaggaaagaatgggaaagtctcggaagtggggaaggagacaaggatcaaagcctttgcaaagtcagatgatgctcattgatttccccctcctggctccatgaatgtggcccagtctctccatttcccagacccgggtttctgtaccctctcccctttatttcctgctgcaaagacatcctacttagctcgtatgcaagggaagaaaggattcaagaatcattcagttgatacacgagatctaaactttgctcttcaggaggtg

SEQ ID NO: 31 - DNA, 2368 bp, Homo Sapiens
aatgcgcatatcttatttgtatcttgattcaaacaaactgttaaaaaaaactataatacaattgggtatttgaacacagattagacataaaatgatattaaggaattgtgaattattaaatgtgacaacagtattgtggttatatgctaaaaagaagaaaacccttatcttgtagatacatactttgaaatatttatgcctaaagtgatattatgtctagaatttgcttcagaaataattttaaggttgggaagcgggtaagataaagacgaaataagattggccatgagttgttaactgtggaatctgagtgaggactagtacatggggtttgcattatactattccatttttccaaatgttcgaaattttccattaaagttaagataaagttaaactataaagactgtttcttaaacaaaaaaggggccgggcgctcacgcctgtaatcccagcactttgggaggccgaggcgggcggatcacgaggtcaggaaatccagaccatcctggctaacacggtgaaaccccgtctctactaaaaatacaaaaaattagccgggcgtggtggcgggcgcctgtagtcccagctactcgggaggctgaggcaggagaatggcgtgagcccgggaggcggagcttgcagtgagccgagatcgcgccactgcactccagcctgggcgacagagcgagactctgccccaccccccaaaaaaaggaacagaacagaaaggtattaagaagaattagaaaaaaaatccactgtccttgactcatttcctgtccccccccaaacgttctggtgtggagaaaaggatgagcattggtaacaagtaccacagtttgccattggggtgggcgggactgatgctctctttatttaaatttttgacatcttgctcatcataaattttcttgcaataattgttttttaaaatgttgcattaaaatgttatttttcttgactgctgaggaattttgcacccctttaaattctgcgcccgcgtcctggttgggagatgtggggaaaatcctgggagcccaggacagggagaggcaagtccccacagaagtgggaatggccaacagctccctgagaagacagcttccctcttggggaggcagaggaagtcccaagaatacacaaagacaggagagtggaagggccggccagtctggagatactaaaagagactccggatgaggataggggctgacccgaaagccccgcctgactccgggctgcaggagggggcgtgggacgggggcggagccgttggcgatgacaacagccccacgtgaccggccaacactgagtgttgtctcgctctggcgtcagagccgtcgtggctcgttccattctcggcggtggtacctgctcccggtggccctgaggacgtgtgggccaggggcggccccgaaattaggaagcggagggggagcaggtaaggaacccggcggggggtccctggggttggtgtgagggagtggctccggcctgcggatgcccaccccgggggagccgtgcggagaagcaatcggtccgcgatgcagcccccgggccccgcggcgggcccgcgagccttccttgagcggagaggtgcccggcccggagggagccggcggtcctggggctacgacccttcggaaacacctgcctacgccatcagcgcaagcttttccgacacccctgccccgcacttcttggtgcagaaaatggtggtcagcttgcggggcggggcggctgaggcggggggcgagggtggcgaggagggccagggccagggccagggccagggcctcggggcggggcgggggaggggccggatggcggtagttcctagctagcgttctgctgcagcagcccccacttcccccaccccggcagtctgcaggtctgcggggctaagtgtcgcggcggcgcacctcgcgtcaagaatccggaggaggagactgcaaggataggcccaggtcggtgcgagggtcggtggtgaggcgggggccggaacgtgaggaaagcccagtctgagaccctaatccatgccttcaccctcgcccccctctaccccatgcaaccctccccttcccacacgccatcctcgtcctccattttgctgcctgcggaagcctggagatggatctacagggaaaatggtgggctttgcggaagggaggggctcggattgagggcaccccacagggcatactggcttctcaggtggaaaaaaatgaaatgttagagtataaagtcaagtccagggctctgaattttaaaaggtgcctagtagggcctctgtcctcagtgcttatcagtccaccaagaattcagcccattttctctctcttgtctcctaggagtaatggagtcc

SEQ ID NO: 32 - DNA, 3650 bp, Homo Sapiens
actgtatttctggccccacagtcttctactgccgactttaggtctctctggatctcaggcccccttctctaagatgcatcctagaggaccaaaaatacactttatttgggcttcgcctgcttttgtggaagggtagtttactagaggatataatctcgtgttttaatttgctctctctcctaaaggaaatgtggagaaaaaaaaaaagcagaaattggaaataaccaatatttagtttatttcattcgattcttaggggaactggtgaggagcctaagatgattttcccttcctagagaaagaatccaaagtccagggaaatagcgacaggggagttcaagactgcccctgctagtccttccttggctactctccgctgcgatcgcaggatagctctcattagcaggagaatcgggcaagtgtgtggataagtagagagtgtgttgaacaacttgtaacgttttatgaaatacgcattgtcatggttccctaaaaggctttgcggaagccgtttgtctttactaatcaagtctttacttacacaaaagtagaagtagaagtagttttagaaaacatactaacaatcttctatccccttgaagaccagagtagcagaaaacaggtgatttgcattataaaattgcactcactttttcctcctttcagatttcacattacattagcctatttgtgttacggtgtataaaaaatggaacaggcgcctccactacattgttctcctttaaaaatagatcacttacaccctaactttgttttccttaaattcgattcttaacaggagagctttctattatttcagatggagtgaggttgcacgactgggatggaagaaaggaatcccttaaatttgggggaatttctgttctctgttctaagaccattttacttggggtgtgggggtgggcgcggcggtcagggcagtggaacgcagtcgcggctgcgccatccctgcacttccaggcgcgcgggagggaccggcggggacgcgagctgcggactctggcgaactcgggggaggcagacagggggaggcggacacccagccggcaggcgtctcagcctccccgcagccggcgggcttttctcctgacagctccaggaaaggcagaccccttccccagccagccaggtaaggtaaagactgctgttgagcttgctgttactgagggcgcacagaccctggggagaccgaagcttgccactgcgggattctgtggggtaacctgggtctacggaagtttcctgaaagaggggagaagggtttgcatttttcctatggaggattcttctctctctagcatttcgtttgatgtattcaactggtagaagtgagatttcaacaggtagcagagagcgctcacgtggaggaggtttggggcgccgcggcgccacccccacccctcctcgggaccgcgcctatttctaaagttacacgtcgacgaactaacctatgctttaaattcctctttccagccccgtgagtccgcggcgacattgggccgtggggtggctgggaacggtcccctcctccggaaaaaccagagaacggcttggagagctgaaacgagcgtccgcgagcaggtccgtgcagaaccgggcttcaggaccgctgagctccgtagggcgtccttgggggacgccaggtcgccggctcctctgccctcgttgagatggacaacgcctcgttctcggagccctggcccgccaacgcatcgggcccggacccggcgctgagctgctccaacgcgtcgactctggcgccgctgccggcgccgctggcggtggctgtaccagttgtctacgcggtgatctgcgccgtgggtctggcgggcaactccgccgtgctgtacgtgttgctgcgggcgccccgcatgaagaccgtcaccaacctgttcatcctcaacctggccatcgccgacgagctcttcacgctggtgctgcccatcaacatcgccgacttcctgctgcggcagtggcccttcggggagctcatgtgcaagctcatcgtggctatcgaccagtacaacaccttctccagcctctacttcctcaccgtcatgagcgccgaccgctacctggtggtgttggccactgcggagtcgcgccgggtggccggccgcacctacagcgccgcgcgcgcggtgagcctggccgtgtgggggatcgtcacactcgtcgtgctgcccttcgcagtcttcgcccggctagacgacgagcagggccggcgccagtgcgtgctagtctttccgcagcccgaggccttctggtggcgcgcgagccgcctctacacgctcgtgctgggcttcgccatccccgtgtccaccatctgtgtcctctataccaccctgctgtgccggctgcatgccatgcggctggacagccacgccaaggccctggagcgcgccaagaagcgggtgaccttcctggtggtggcaatcctggcggtgtgcctcctctgctggacgccctaccacctgagcaccgtggtggcgctcaccaccgacctcccgcagacgccgctggtcatcgctatctcctacttcatcaccagcctgagctacgccaacagctgcctcaaccccttcctctacgccttcctggacgccagcttccgcaggaacctccgccagctgataacttgccgcgcggcagcctgactcccccagcgtccggctccgcaactgcccgccactcctggccagcgagggaggagccggcgccagagtgcgggaccagacaggccgcctaggcctcctggggaaaccgactcgcgccccatacccgacctagcagatcggaagcgctgcgactgtgcccgcaggttgaccttgccaagccctccaggtgatgcgcggccatgccgggtgaggagaactgaggctgagatcgccacactgagggctccctaaagccgaggtggaggaagaggagggtagaggaggagggcggtattgctgggaaccgccccctccctgccctgctccctgctgccccacccgagccctggcagtctggaacctggctggagtcggaactctccgcgccttcgaagggaggcccgaggacgctgccggcgcccccaggcgtcggctccgcgcggcccctgctgtagctggcgcacagccccggcgggtccccttgtcctccgcgcgctctgggaagacggtcaggcgcgcgcgtttggcgcccacccctgtgagacccgcttggcctggcgccgcgggcggggaccgctgccgaggccgccagcgcctcttcaactggggaaaacacaacaactcgggatgccccatcggagtgtgtatacacctgtgtgtgtgtgtgtgtggtgtgcgcgcgtttgcggaggcatgaaatgcggggaaagaggctggcgcttggcagtgactgcctagaatatgatacgaatagtgatccttctttctgtctgcccctactccttttctttgccttttccctttcctatccgtgatctcccctgaaaatgtcagactcccggagcaaggaacccggagtagcccgggcgcgcggttccggcgccccctggaggagccagcggccgagtgcttagcgtcggaggatcgcggggctttgtggtggagcactccggctgagcgcgcttcacagcg

SEQ ID NO: 33 - DNA, 2429 bp, Homo Sapiens
gtcgtcaaggctgtggcgtcacgcctctaagcggatacggcagaagttttggggccagacacaagacttccaagtttgaatgggcagcgcaaaacccagacaagttttccggtagtgccgccaacccctgtcaggcacagaagacacagcgagaaccgtgagccgttacgaaagcctaaaacactgagctcgcgtcctgccaagcagcaggcgcacaaacctacacctccgagcgctccctggaggtcccgcccactcttctctcccgagccggctagagatctggaagagggcgggccaagggtgaggagggcagtatgcgcatgcgcgctcaggacccagtcagtgagccaataaggaatctcgcgagtgttgaaagtcggtggcgtaggtcgtcgtcctggatgctggcgagatagatgttatcttccagaggaagaggaggaggcggcgaagcgttttcccagcctcagtctctctttcgttttccttttcccttcccccaaccctccgcccttctctaaatcagccggccttccttgacctcagtgacccgtctggccccgcccaccctcgtcgacgtgattcccgccgtgaggtaagcgccggtggaacctagagccccgcggaagagcagaacgtttgggagtgtgcagctcctgggcccggctcaggcccgtcgcggaggcgcggcgcaggggagcgctcgggtgggagtctcgctcctccaccagtttattgcgacgtagcatccaggcctaggcctccccgtccatccccgccggactcgggcctctggcagcagcgggtgacgcagacggaacatcatgtcgtccgcggccgagcctccgccacccccgcctcccgagagcgcgccttccaagcccgcagcctcgatcgccagcggcgggagcaacagcagcaacaaaggcggccccgaaggcgtcgcggcgcaggcggttgcgtctgcggccagcgctggtcccgcagacgccgagatggaggtgagggcgacttgcggcatggggagcgggtgcagcggggaggaggagctggctccctcgccggatcgtggcgatcggacgcagagccgggtttctctctctgcaccagactcagcttcacaccctgtggatacgaaatgatgctctcactcttgctcccttgttcttaccctattcgagctaagcaaaatggatttctggctcctcacatttaaattatttgtctctttcgtgaatcctgacaaatatttgaacgctctcagtgaacagatgttcttggttaccgtggcccgggggacccatcgtttttttcccactagactcccataattccctctcctacctctgaatgtggtttttagtttccaccaaacttcggggaagggcgaggagatgaccccttaggagcgggatgcacgggcggggtgaaggaggcatttaaaagcagcgcgtccgaggacttgggcctccttttcttcttcccggtccttgcaggggcggtatctgttgtgggcagaaacaatggcgagagctggatggccgagtgcgcagtggggataagcggggcgcagctgcttctgtgaagggagagaaggcccctcccaggcactattccactggaagggaagcaaccaaggcagcagcagctgtctcggatcccccgtctaatttaggggggatgaataagtgtaggaatgaattagagaaccaggcgcagttggttggctctcagtccggcacttttctctttttggcctctggccttaagaaaaaaaaaaattagtaccactcgctgccgagacttatgggtttgggttgggcaggggatgctgacagtactgagggggctggaaagatgggggaagctgccaggcgggtaaattggatatgcttccaggctttgcatctgggaacaaagtaattgctccttccaatttttattttcttggccttcgacctgttttgagatattttgtgagtcggagcccaaagatttctgggattttcctatccttagacagaatgaaagtaatactgctccgaagatgagtcttgatgcagaatcattatacagtaagaaaatggtagcgtaatttaccattgaggcttttggcacagtagttatatttgggtagctggggttaagtaacattaatgttagtaatcatttaaagaacttttagtggtgagggtaggtttagtgacataggaactcctgatagttcctgtagttttgagtgattaagataagattacttccaaattaaaatatattcagtgttgcttttttttccttaaggaaatggttcttttgggttactagggctctttaacttggatttctgttccaaggcttaaggggtttgacacaaagcaattatgtgtaaatgtgcagttctctacaaaaattgtttatagtttttc

SEQ ID NO: 34 - DNA, 2284 bp, Homo Sapiens
tgtggcattgctccctgtaccgtagggctccccgggaccgacagactttggataacagcagttgggaaacactctaaacatataatacatctccaactcccaaacactggagttgtggggtttttttttttttctcttcctttttttgggggttggaggcggaattctttggaaaattctggtattttgtttctccactaacctcaccctctgtggctgtttctattaagatatattttccccctgacaatctctccatattgcacctagtacaacagatgtacctgtggatccactgggcttttattgggttttgggaatactgatgttatttcacttaaaaactaatccaagcttaatgttttgatgaaaatgaaaatatatccacagggaagcaaatatccacagccacccagtcctctaaatgccacacacatctcattttatctaaagtgttttttcttcccttccaattacaaaataattcagtttactcctaggaagatcttcctattcactgtttttagtcatgctagcacatcttcggttttaaggatagagaacagttaggagttacagtattctgtttcccattctccgcatgtttctccccaaccctcacttttcctccctttcgtgttgtctcctctcctctccatgcaaagcagaacaagaagactgccttccacaaagacaataggcttttcccaactgtaaatgactacatcacaagccgcacctgtcagttaatcagtgcatttaagtctttgccagcggatgttgaaatgatgtctgcaataactgactgggtttctgcgagcccagggatgcagacccctccttcccccgccccccgtgcgagtttcagtcgctaatgaaaaccgtatgaaacagattccccttctgttatgtaaccggcttctccctcgcctttcggctgacttgggcacaatgtttctcatgagagtggagatgcctgcggcgacggcggagctggggaaggggacgcggggacccgagagcacggaacgcctcgcccaggtggacgccagctcctcgcctgcgagcagctcagcgcaccgcttacctggctgcggacggggtggcttcactcaatcatgatctcctctcttgaaacggagcaagactgaacaattcactacacgacggatggcgagggaaggaaatgcaaaaaagaaaaggaaaagaaaaaaactggaatcagatggtcaaatttcacatcagcaccgagaggctgttaggagactccattctgctcgcggctgctccggctccaggtccggcttcccggcgtccgcgggtctccacccctccgcccgcccagcctctccagccaggtgcggccgtctccggactggctccctctggccgagcgcggagagcagggctgggcgctggggccaagggaggggcggaggggcgcgcgtttgggcagggacgggggagggagactgggtggaatgaagtggggaaagataagagtggcagaagaaaaaaaaaatccccggttaggagaaaagtggtggaccacgcagagagacgtcatgaaatccgcagattcaatgaatgctactcaattccagccgactggctgagccccgctggcagcgcacgaagcgacgcggctccgagataaaagcgagtgcagcgccgcgtgctggggaaaaagccgcacagcgccggcgcggtccgggaggaaggggcgggggcgagcaggacagagccacagacccagagacgcccaccccgccgcccatgccagctagcgtgtcagcgcgtcgaggaccgggcttggtgggggcgggctgggcacaaaccaacgtgcatcccccgccactggaaacgtgggtgctccatgctgggggaatcttttgggtttcggtccccgaccccccagtcccaacctttctcccagtgccactaagtaagttattcccggagaaacgcctggaaagcaggaaagagccgaagctcggggagcagttttgtctgctggttgtaggggttcggcttttagggttttgtgagataaggaaaaagaggctctgggcactgcctcccaccgggctgaaatccgtgagaggcagccccggcgcgggagccggagcctgcaccgcccagagggggcgcagcgagcggccgggacggaggggaggggccctatccctgagctttgcttgcacctggtggcgccccagcctgctgccccattcagtcccttctgtcctgtccactgcaactgggacctggtcccggctgctgc

SEQ ID NO: 35 - DNA, 2290 bp, Homo Sapiens
aatgcagtaacattcgggtccactcagcaatacagtcaccatttatatatacccaaaggttactaagacaaggtagatgcaggacagcttttccacccgctcaccaaaatggaaactccaggtcagcttccacaagaaatgggaaattcaagcgactctggcgaaacgattcttgagaaaactcttcaagggcaacaaaacaatatttcaaacaaacagattttacttgagggaatggggacattacacagcaattgatattcgaatggttttaaatggactgattcgccgtaagttttgaggctgagctaaatttttatgaagaattattaggaatagggccactagaaaattaagttttaaaagcgcttttgtccttgccgaaggtattacattttggcacttctaagaaccgttctttgagggagggaataaaggagagtggacaactcgtagcaaatccttttcccatgttttcagaaaatgtagagacgataggacttgaaaatctttgtcataaagatggtctttaaaaatgcacacaattctaaatgaccatctgggcagctacaactgcatgctcatagctcgcatctagaggcatggttttacgctctggccctgaaggataacaaggaggcttttaaggaaatgccgtgagaaagactgctggctaagcattgtcacggccactggaggagcacctgccagtgaaccgacgctggctcccccagtctcaccagtgcacgcacactagtccgtgcaccccggccgccgctggcaggccctaccagccaagctggaggagcagctgccgcaaccacggcaagcgaactgaaatcccagagccggcctcgcccggcagagcgcccgcgcttcccgcgcagcgcacgcctcgcgcgcaaacccgagatgtgaccgcgagctgcgacctcgcgcggctgcgacgggcctcacctaacgcgcacgaggggatcatcattgctcctgccctgggcgcccgcggccctacaccacctccgcacacaacgcggccggtgttaagtctccaaacgccccgagagctccaaggaccgcgcgcgcgaaggcgccgtagcaagtgggcacacaccagacaccaccccggcgtgttccgcgggagaagccagtgcacacatcctcccgcaaggcggggttgccagtgcaacacaggaatcctgccctttttctagaaaagccccctcccccactttccctccaatacactcacctgcgtctcaacagtttccttcttgcgctacacgcggccgcacccgggcacgtccacgcccgtgcacgctgccaggcgcgactgtccccgctcggctcccgccgcccccaacctgcttgtgcccacgggaggggcggtgccacctcccgaggcgcccaattctctctactcccgccgcaacgggctgagctctaggaacttcgcgggcacaacctccgccgcccccaccagtgttcccgcccagagttcggactagggcgcaccacccctaccctgctagacgcagcgggggcgcgcacagaccttagcctcggcgtccaaaatggaccaggggcaaggcgcggacgccgtccccgcccccacgcccccagcacttgcctgctgtgactcgaagctgcagctactacggctcgtgccgctggccgtcagcactgccgcggaggagtcgctcggggcgagctccgcggagaggcggtggcggcggcggcggcgggaaaggggactggaagccggcggaacccccgccccacccgcgccgcgccgcgccgcgccggcaaccgccctcctcacccggccggctactgcctcagtgacgcccaggcgccgcggtcccgccgtttgtagcggggcgggaaggaggggcttgcttggaagagcgccaggaggcggggccggcggcgagttcgcggcgccgcggccgccgccggcgcgtgccctgcccgaccgcccttcgggtccgtgccggcagggagatgccgggcttcagcagctcagctccgtccctccggacttccgagtctcaccaggcttccccgacaaggtttctctggactcggtggagagcgttgagcgcccagaggaggctgattccaggtgcaagtttgcaaatcccgaggcccggggcgctaacggggagtcagagcagctaacgtgggggttactttatgtgttcataaatgtatttataaatatatataagtatacacacatatgtgtgtctcttttaaaaattctctttttccccctacttcgcagccaagg

SEQ ID NO: 36 - DNA, 5909 bp, Homo Sapiens
ggccgtcggagcagggccccagcgcaccgcgagcctctgcttcctccgccttgcagcgccgcgagcccttctttcctccgcgcctggccccgtctgcgcccctctcggcgtgggcattcgcagacccgctaggaggctgacgagaggtgtcctcatagagtcctgccttcttccagacccccaaacgaaaagaaagagaaaagccaacctttcgcctccattctgcacgcatttggagagcggctggtggcgagcgatccgcacaatcgcttccctcgcggcgtccctggacgggcggagagaacccgggtgactgagcctgaggctgagcttccttgggagcgatccatgccagccacttctaccttcaagggggactcgcggccgggtttacgcgcgaaggatgggtgccagggaaactgacttatagacgacccgctccgcgagagactgacaactcagtcctgcgggctttcggggcgcccagaccagtccttagccagaggatctggggctgcacagctcccggaccctggagggggtggtccgggggtgggagactgcgagcatcagcccacgccggccccctcccaccctgcggcggcgaggtgggaagggccaggatgcgagcttagcacctcccctagaaatgcagcacttcgcccccccacctcccctgccctcggcgctccctctttcacgcgctccctcccgcctccttcccaagggcgcccttcttctgcccccagctcacgtctgaatccctcggcgccccctttctcttctcctagccccttcctcacgtcccctgcctccgggtatttcctctctccaatcccccacccccgcaccgcctgattccgaggggcgggagcgcattgggctgcgcacgggtgggggcgccgcgccagcttcgcgtagctgctctgacgccgctgccgccgccgccgccgccgccgccctccgcagcccagctcgcgccccgcggcagctccgcagtgcactagccaccaccgccgccgccgccgctccgccagacctgctgccagcttgcccggtccagccctgagagagcctcgaacgccagctgcgagggtcatgagccagagagccccggggcgccgcgcggagagcaagcggagatagcgactttgcgccccccagccctcgccttcttgcatcgcgttccccgcatcctcgggtccttctgtcctttccgctgtccccaccgccgccatggccaccttgctccgcagcaagctgtccaacgtggccacgtccgtgtccaacaagtcccaggccaagatgagcggcatgttcgccaggatgggttttcaggcggccacggatgaggaggcggtgggcttcgcgcattgcgacgacctcgactttgagcaccgccagggcctgcagatggacatcctgaaagccgagggagagccctgcggggacgagggcgctgaagcgcccgtcgagggagacatccattatcagcgaggcagcggagctcctctgccgccctccggctccaaggaccaggtgggaggtggtggcgaattcgggggccacgacaagcccaaaatcacggcgtgggaggcaggctggaacgtgaccaacgccatccaggtaagcgcgggattcccagttctgcctgtcctcccccctcccagctcagcgtgccgggctctgcccccgacagtcgcccggtgatctcggcctggagaccccctcctgtacccaggaatctccctttctccatccctcccagccctgcgcggggacctacgcccccaggcggtgttttccgccctaacccacgctccctcccaacggcaccagctgcaagaccgctaggctgaagttcggtctgagacacctgtccggagacactgcaaaagtgaaggaaatggggggagggagcaggaagcgatgagaaagaaagaaaatcaggattggagggcacggtttggtcttggactctggaacggattcacagctgcatttttgggaggaaagaagaaggggaaatcgctgaggtcggagtctcctccccccgcacacacgcatagacacgcacacgtatataggcaggcacaccacatgcccacagccccccttcccacgaacaaaggcgcaggcacaggcgcacacgacatgtatctatatatagaccacagtactatccccaaatgcacctgcgtacacccctacagctccacaaacaaaagcatatacctgcacataccaaacacacgaatattcgtttgaacatatgcacacacacatgcacagatgcatgcagacaggaaccagcctgctcccttgggtgcggccctgttggagacatacaggtatacacacacgaaagcacacacatgctcccacacaaacacatttagtccgcaataatccagcattacctgtgcacagactcgcccctctcgcccgaaatcccggctgcaccgcaaagaggcggccagctcctccccgtgtgaccctggcgaagccctctccagaggctaagaatggcccctgctctctaggccctctccccttattcctaaccccccactccccaccaggcggcgcaggactcctacatagggagcaggtttggagtcttggcaacgacctccgagctagcaggggctggcaggccgcagctttctgggccgaaggagacttcagctctaggcaaccccggtcccttacagcttggccccgcggcgtccctggagcgcactatcactggggccacggaaggcaggttttctgggagcagaggcctcccaggggttgttccatgtatcggggtaagcaggactccaccgggccccgaacaccagatggcccgacccaaggcgctttccgctccggggcccggcgagacggccttgctggatcacggacccggggctgctcccgccttcgctgtgccccgcgacttcccggggcgtctttcaaggctccgtttgataggccccaagggaggccagggcaggaggctggaggctcgtaggcctccgggaccctggatttcgttagctcttagtccccgtgtggattctaaaccctacagccctgtccgcctgaccctgaagcttctggttctagactcttgctcggttcggctttctggcctccctggcgccttcccgccaagctcctcctcctgcttgcctccccagcctccacttagtccccttccttaggtctcgccctcgcctcactctaactccagccttgtcctaagactctcaatttccagccctgcttcctcctccccgcgcgctgctccccaagcgtcttcacattgtctctgttcttgcctcccaggggctttgccccaccttcagcccctctccctctctaccctatttccttttcgcctcacaactgcagcctttaacgtttcctcctctggtctgagcctgagacgcccgagttttcctctttagctcccgtgccccattccagccccaccacaaatcccgtgcccactctttccactggcccaggcccagctcactacctttcttagagcccctttccgactacgctcccttctgtcccttctcatctcctcccccaactcctcattctgttcctgtccccagaaaccatcccgaagtatctcccttccctcctgtggcttctccctattctcagccctctcccaccctagccctctcgctatcaccagccattagcgcacctttccttctcagatccgtccatacatccctccctctccatctctggctcgacacccgggctcactattagttcccctacatccaccccgcagcctgctcttaacctctcctccccggcggctcagacccaattctcagtgtccttagcgcccccttcgggccacagcgttaagccacgccccccgggcccctcatccgttgccaagttcgctgagcgtccgcgtctggttgcctctccgccccacagggcatgttcgtgctgggcctaccctacgccatcctgcacggcggctacctggggttgtttctcatcatcttcgccgccgttgtgtgctgctacaccggcaagatcctcatcgcgtgcctgtacgaggagaatgaagacggcgaggtggtgcgcgtgcgggactcgtacgtggccatagccaacgcctgctgcgccccgcgcttcccaacgctgggcggccgagtggtgaacgtagcgcagatcatcgagctggtgatgacgtgcatcctgtacgtggtggtgagtggcaacctcatgtacaacagcttcccggggctgcccgtgtcgcagaagtcctggtccattatcgccacggccgtgctgctgccttgcgccttccttaagaacctcaaggccgtgtccaagttcagtctgctgtgcactctggcccacttcgtcatcaatatcctggtcatagcctactgtctatcgcgggcgcgcgactgggcctgggagaaggtcaagttctacatcgacgtcaagaagttccccatctccattggcatcatcgtgttcagctacacgtctcagatcttcctgccttcgctggagggcaatatgcagcagcccagcgagttccactgcatgatgaactggacgcacatcgcagcctgcgtgctcaagggcctcttcgcgctcgtcgcctacctcacctgggccgacgagaccaaggaggtcatcacggataacctgcccggctccatccgcgccgtggtcaacatctttctggtggccaaggcgctgttgtcctatcctctgccattctttgccgctgtcgaggtgctggagaagtcgctcttccaggaaggcagccgcgcctttttcccggcctgctacagcggcgacgggcgcctgaagtcctgggggctgacgctgcgctgcgcgctcgtcgtcttcacgctgctcatggccatttatgtgccgcacttcgcgctgctcatgggcctcaccggcagcctcacgggcgccggcctctgtttcttgctgcccagcctctttcacctgcgcctgctctggcgcaagctgctgtggcaccaagtcttcttcgacgtcgccatcttcgtcatcggcggcatctgcagcgtgtccggcttcgtgcactccctcgagggcctcatcgaagcctaccgaaccaacgcggaggactagggcgcaagggcgagcccccgccgcgcttctgcgctctctcccttctcccctcaccccgcccccaccagcccagtgcgccctgccgccgcgcttgggaggccaagctttaaacatctctggttcctagtttctgattattcggggatgggggggatgggaggggacagggattcacgatccatcgcgtctgcgtttctgttgtcctttcttttccacaacaccctggttttggggggaggcggggtgcatttgcgggcagggttctctgtccttccaagtggggccccgacactttggttccagtcatcgagggggttgggaagggagggagagggggcgcagctcgcaggcgtggcaacttgaccttgggggaatatttcacatccatccagagctcggaatctacagcgtccagccatttccagcaagagcgcttcccattccggagacgtttcaaccctgcagcgggaaaggctgactgggaaatccattttgggtgggcaatttccttcaacgaagccggaaggcgagaagccgcggcggggccagcttgcctgccggttttcaggaatctaaactctcatcttgtgcaatttatcaggtgtggaactgttctactgtgcgtgtggtgtgctcgtggtgaataagatgaaatgtatatcagaaaaaaatctatctctaatttagagtgcggtacataattatatccgcaaataaagaagagacaaaggcttgcgcggcccggtgtcgggtttgtg

SEQ ID NO: 37 - DNA, 3051 bp, Homo Sapiens
gtactcggtgtagctggtccagatcttgtcctcgctctggtcggtgctgctggcaaaggcgcaggtgcccgtggagctgcacgccaccatgtggaagcccgactcggacagcttgtcgaaggcctgctccaggaagttgaacttgaggtaatagcgcgaggtgtagcgctccgggggacggtcggggtcccggctttcgttcagggtgtccccaaacacctccttggccagcgacgtctttccgcaaacggtgatgcgcgccactcgccggaacttggcgtccgcctgcgcgtcccgcccgatggtgtaggagccgcggtagccgatggtgatgtagcccgagcgccggctgccgtccagcgactgggacggcgtgagcagcgggcccgccgcgcccccggacggactgcggctagccagctccagcgtgggcgacggcgccccggcagaggcgccctcctgctgttcgggctccgagtagccaagcggcagcagctcgtcacccagcgagccctccttgtgcaccccgcgccgcgagggcggcggccccgggccgggctgctggggcgccccgaggcggcgcacgagctctggcagctcgaagtactcggcctcgcgctgcagccggctgcgctcggggaagtagtcgggcagcacgagctgcaagtcccgcaggtaatccaggatgtagcggaagaggaagccgtcccggtccagaaagaagcggcctttgctgtcccgggccagctcctgcggctgctgctgcgtgaacatgcgccagagcagcgagtcgggcaccgacaccaccgtgcagcgccgggtcacgtacacctggccccccacgttcagctccacgatgtcggggaagagcggtggctccgcggaggacgacgaggagccactgccgcccccgccgccgcccccgttgggtaatccacgtgtgctgtccgccagagccatgacagagaggtggccgggccgggacagtggcaggaagccgcgctgcactcaggagctgcaaccgccttccccggagccccggaacccggacgctcgctcagccctgcgccccgccgccgccgccgccgccaccgccgccaccgccaccgccgccacctcctagagccgcgcggagccgagcggtgcgagcgcgccgctgtgcgcccccttgagttccagtgcgctccgcccgccttgcccgcgcgctccaggcgagtgccgggtcgcggcccgcgcgctgcttaagtagagccgcctgctctggtgccgtggcgcgcaggaggcgtgggcggcggcggagcctcgcttaccgggcgaggggaggtggggagcggggactcgatttgcatcttaaacgcggacgccacgcggggctgctggctccaccccggctcgcgagcgctgggggcgcccggactcccacccgctccccacccaccagccccgccccgtggtcccgcccaactttctccctcttccgaagaggacccgcccgagacttggcggcttcggaagacagctccttggagggacagtcaccgcgccccctcccctctcgccccagcccgcacccaaggactctggaaggaggacgtgaactttcggaagcctgtcgccccgggagtggaaatgcgtggccgcctccggccctcccgcctgcggaactgggcgcttccagcagtgcagctgcggcctgccatcgttggttgtcgtgtcactgaaagtagagagacgcgaaaaacctggagagacgaaagagccgccccagtccgagcgcagccagattttgttcaagttgccttgcagccagcctggaaaataaataaataaacctagaaacaaaaagcaaacctcagtgtcccgcagtaggatgctttacgatagtttattttctggctgcagagacaaaatgagatgaagcttcaaatctgctcttaattgcaattccctcttcccgcagggccttcgaggcacttcacttcgaagtgaaggggtaagactccggaacgttcggtctccgggtcccattcagccttcgttgaatcgcgcccttagactcacaacagttgcagatctaacgtaatttttaaagccacctttggcgcctgcatgtttatccttccaaaagtccaggcgccccttctctcccgcatgcctcggtcactcttcggccctgtccaagttcccgtcagtctcagaaagggatatttatatatctgaaggcccttgtctggatcccatctctcaactcctgctgcctacacgtttgcttttccccctcggactgcagcccacagaaccgccccctccccctggaagctttccctggcttcccaggtgggtggggcctctggatggctccctacacactgtctgcgctgctcccagcacgttctgaaatgtcatatttatgagtgattatctgatcactgatttgggtatgaaaataagtaagagctcctgaatgctgcaaaaagagaagagtgcagaggagggtgtcaagaaatgattgggtcactgaatgtttcttgtgtacctgctattatttgcagggcaccagggagtgaggaatgcaaaggcgaataatctccaaagcgctttcagtgtagcccaataagcaaagggtcaggggtctgcgcagttatcacatcagtttgaagtatagaccacacatcaggataaatcaggcaagatctttgttcttgataaaatttatccttctgtgtaactacccagtgagcttcacagtctcctcacagataaatgtcatttttattttgaaatgtttatatctgctcaacaattaccgcgctcatgtcagtgtgctgaaatgagatcaacccccaaaccagttatcttaattgcaagtacagattttgatactgaatgtatttcaacattctttttttgttgttgttctgttctttgggataaataatagataacacaaaacttccaagtcccagtgcaggatttcgaggtggttgtgctactaggcgttatattagtgtcagagacctgacaaaaccagcctcttttctacaaatccaa

SEQ ID NO: 38 - DNA, 4722 bp, Homo Sapiens
acgtgaagcccagcacctccccaagcctttgcctacacacaaaaagccacgttctagaggctctatttctaacttaagataagcaggatattttaaaaatcatctactcaccagttggtttgagaaaatccatcgggtatctggagtaaggaggggggggagactctgaaattaaaaaagcaagagaaaataaaggcccagccatgagaagagagatagaaacttatgataacagaggcattcttttagcccaactgtttgtcttagctgtgggggttggaggcagggccgcgaggcggtgattgccttgatatttagctgtcagataaacaaaagaggccgcctggcgccagcctcggcgctccgctcctccacgtctgcggccgcagccgccgcgctcggctggcccggctggaaaccaccggctcggccggagccgcgcacttcacagttcacagggcggggggcgaccatgccccctccccgtcctcggactccagacccagctcccagcaacctcggctccccgccccggcccgccccccaggcgtgcaattcacctctgcccccgccggtccgctcggcactcgcgcgggggacacggggctgcccattcctagcgcactcgggagatgcatcccaagcgtgctggggaacgtgggggatctgcgggcgcccggggtgaaccctcacatcacactctgtgtacagagacgtagagtaaaggaaggaatggagaaagctgagaggataaaaggaaaggagtttcagggtctcagccgagaagcccaggccccagcgcagtaagaggcgacaacgtcactgaggcgccggggccccactaatctacagacttatctgtgcggaaggaaggaaaaagtaggggacacccaacttctcctgcctgtttgttcctctgcaccctggggctggcagagttgaaaggagacagatacccagttcggccttccatccaactctctttgccccaaaactccaaaggtgcgcggccacgacagtatctgggccactggtgttcgacgtgattctccgtatttactaaaggagtaaatacggagaccttccagcctttatagcacgcctctcccagccttccttggcgggcctggaccaaatccaactcggccacacacctcaacgtctttccgggtgcggggaggcgtgacccccccacctccctctgcacccccttgttgatccggaaatgaaggcgtctaatttttaaccgcagactgcaggagcagtgcccgtagaccccttcggggcaacacaggagaaaacctggaagggaacccccagggaatgccctttgagtttccccttgtcccttctctactttcagcccccagtctcttcccaggagggtatgcacactctcccaggagggtatgcacactctcccaggagggtatgcacactccccctggagggatggctgcacaaacgcactgccctaggggcttttcttccagcactggcgctccggaaaatgttgggggtagggggacaacttctcacctagttcgcagagtcggctaaggtgatgggggttgcagcacaccagctcggggttgatcttcccgtaagattcacagcaacacagcctcttgacttccgaggaatgcctgagatccggccacctgaacactttgcacagcaggagggggagcgagtaggacgagggcggctgcgcaggctgcgcgccggcgggcgcccccgggcccagcctgcagtccaggcggccgggcagcaggaggcacgcggtgcgcgtcccgccgcgggactccacggcctggagcagcagctccagctgccgctccttcagtttcttgagcaccgagtgcgtgagcgccttcagatccgcctcggcgcccccggccgcgccggcgcccgcggctggcgggtggggatggtggtgacctttggcacctcgcaccgccttgcccaggcagcatccagccctgcccgggccgccgccaccggccccatgcgctcggctgtccgtcgccccttctccccgcagctcgcctcctcctccacctccccctgcgccctcctcctcgtcctcgccgccgggcgcacggctcctccagagacgccggacgagcgcagatcgtttggtcctgaacatgcggggcgaggaggcgaggagaaaagtcgtttgcctgctaaggagcgaacatgacctccgcacaccatgaagaagtcgggcgccgagttggggcagcaggcgcaggcgacagcagcagcagcaggggcccgggcaggagcggcggcggcccgaggggcgctccgtggcatgcgccagtctcccggaggccggggcgcgcgcgggggcccgggggcgcccgccggggatcgggggcctgcgctccggctgccccaccccgcgcggcccgcgccctgcgcggctctccggccccggcgcgccccggaggaacccggccgccgcttccctggggacggccgagcctgcccccgtcggcgcctccccaaaaagaggcccccccgcagtggctcccgaatgtcgggctcgccagcctcggcttcctacatggaaggtccgcgggggcaaaaaacgaaaggcgttcggctgggctgttggaagaaggaaaaagcctctttcccccttgctaagcaacttaatttgggggtggggagaagcaggcaattaaaaaaaaaaaagcaagcgatttatttttttcctctatatccttagtaaccggatctcctcgaattccgcgcacacgaagactcaggggagggggccgagtggacttcaccccgcatgagacgtctggcaaaataagaaggctctcgcaaaacctaacaaccaaatatgcaaagccccaaatgaaaaccaccacctcctcgaacctcagaggtctgggggcgtccggctggaactggggtttaaaaaaagaaaatgtttacaaagtataacaagatgtttgatgggtggaaaaatgtatccacgagttacatccccccgtttccttgcaaagccccgctggtcttcctctccttttcttctgccaaaaaaaaaaaaaaaaatcgtgtatttttttaatccacagaaagctttggctagaccgcttcaatcctgcgcatctgggtggtttaggggagtctctggtctttccccctgcgctcctgggggcccaggtcctcggcggggacttcctcgaggctggcgcgggcgcaggggcagaagatgctgcggcggcggctgagcccggcggggctgacagcgcgggggagggtggcgcggcggcggcggagggccccagacgggtcgcgcgttctcgccccccccgggcacaagctgcttgctagtgcaggggccgccgatgtcccttcccctggccgcggctggccgccgaggctccccgcatgggctgctcgcctcgacccagctgcggcggcaggaggccccggtgtcctctcggcgcctcctcctccgagactctcctcgtcgcgcccgggagcctccttgtccccggtccgccctctcctggcgctccggtccttctgccgccgccaggggctcgccgcgccgcactcaggggctcaggggccgggcgctcggcggctcggcgccgacggactggctctgtctcgggcagctctctcccgcgcggcgagcggaccgagcacggcgcccggctggctcggctggcgcggctcggggacaggatcttccgtgcgccgagcagcaagcgagtgtgcccggggctcaccgcctcccgcaaggcctcccgcccccgcccccttccctcccccttcctcccccttccctcccccgcccccagccgccgcagccgcgccgcctcctccccgcccccccgcaccccccctccggccctctgctcggctggttccactgcgcagtggcgcgcccggctccggcctcgtcacgtggccgtctagacaccctgtcgctttaaaaaaaaaaaaaaagcgattgtgtttcgcaaacaacagatcgggtttctaaaagctatttctccccccaaccccccgccaccgccaccccctcccgggtctgtagagggggtaccgatggaggggagagagataggtggggggcagagaagctcccagaatggattgagccccggccggagccatggagaaattggaaaagcagggagcaccgagcgggcttcgccgcgagttttggagctgagcgagcgggtcggtggcccgatttcgacccggctgggtttcgcggtggccatctcgcgcgcgctcgccctagcgcttcattcattggttttgttttaaaggccctggcggtggatcccttggccgcgcccgagggcaaggggaggagagcgctgtctcggtttaaaagacatttataccggactggaccgaggccctgggaagtgtgcgctgaggggaacagccgccgagggcggggaggcggcgtgaatatgacctcagcggcggccgcgcgctccctcccgccctctcagctccgggctccggtttctaggactgcctggagaagtgtgtcttgtgcacagctctggaatgcatttggccggctgacgagctgtgaggggcagcatcccggcgggagaaggggagcgggggtgggggctcgcctgcgcgccgcgggcaggtttcctcccgggcccggaagacctccgccacccgccaccctgcctcccggcgcgggaaggttacccagcg

SEQ ID NO: 39 - DNA, 2146 bp, Homo Sapiens
aggtttgtgcacccgggtagtccctggctgctgctgccaggctgcctcagccggtcgctgctgccgcggcgactggcgacaagctaccagccacctacgatggcccaaggaggcgaagaagagcaagcgatcaggacaccaaaacggttatcggaggcaggttcccagcacaccagccggccgagggccgagccccgcgggcggcagcaagttttgggagctggaggtaaccgaattaaaaggcgccttagaaactccgcttcgggactttgctcagcagggctccgggttggagggcgccgaggcctggcggacgggacagtgggaagagagaaaggtgctaaggggacccaagatctgggatccagaacaagagggggtggggaacaactctaccaagccaaacagatctatttcccttgcctccatgttggaaaaattcaggttccatatggctcctcgggagggagggagggagacggtggctgccggcttccccccagggtctcgctggagaagggagatgagccccccgcaagaaccccaccttgccaagcacaccccagggagagccaggagagtaacaatagctggggaagccccgagagaggggataggccatcttccaggacttaaaaaaattaatgggagaaagaaaaataacaagaaaggaagacagagaaaggttgagactttcttagcagccgcggagaaaattcagccctggatctggctgctgaaagaaaagagagagaggagaaaagaggagagaagcaggaagacagaggggagagagagagggagagagagagagagagagagagggagagagagggagggagggagggagggagagagagagtcgctgcgtggaaggaagcttaaagcttgtgaactcttcttgaaccgagattggagtcatatgggccataaatcattgagacatactctccgccattcacaaactgatagcctatttcagtccagcttaccttagccaccgacgaggggagaacaggcagacataatatatattcacatcgagccccagagcgagcggcaggcgacaaatctcccctccttgaaggcaaaggaaaaaaagaccactgtttaaagctgcgtcgccccccgcccccccgcccccgccccgcaaagccaccccggctggggagcccgaggggcagaccggccagaggagccgcgcggcgtccgcttcaattcactcggcttaggagcaggggtgcgcaggagggagggggtgggggagcgggaaaaaaaatagaagaccgaaaggtgccgggcggctcagctcgccagaatccagctccgggctccagcagggctaagccgccacagtgtggttgccctataagactggtacgccctactctccgtaacaatggcctctgcttttgcacagggaaaaaaaaccacacagacacacacacacactcactcacacacaagctcacacccccccacctctccccctttagcaagcttagatgcctgataaggagggaaggtgatggtggtgatggggaaggggggaaattttaaaatacccgcctccccaaaaaaagagtaagaagaaaagaaggagggtttttttttttttccttaaagaacaggtaaaaatttaaatctagattggagggacagggaggaagaggtgagcaaaggcaaggaagggcggtgaagttcacagctccccccataccccactagtgaactattatgctaatatgagaagtagtatttggaggctgagtcaaaggcaggcctggcccgggggtgagggtgccgggtgcccctctgcactcattcgcaattggaacaccaggacttttttagaaagtagttctgggtctccaaccctcacactctggctccctccttctgagtctccagccccggcttcttccctccactacaccctctctattcctcccaaatctccctccagtctccaggcccagtctctaaccaagggagagggaaagaccagaacttaaaaaaaaaacaaaaaaaaaacacccctccccctttttctttttgagaacagacaacaagcggtgagtgatgattttaaaaactctgaacatcttgcagggggaggagggttgagaaaagggtgacaaaagga

SEQ ID NO: 40 - DNA, 17968 bp, Homo Sapiens
ggtctccggaggccgggattcgcggagggtccagcagcaggaagaaaccccaggaggaagaaacctcagacagatcgccggcgaggcagcgcgggatccagcctcaggcgtgcgcggacggtgtgcggagtgagtctccccaaaagtggagcccttgtgatgacgagcacaggtccgcctgcgtgcccgtgggctgctctctcaccggtggctctcagtcgcggagagcagaacccggcagcttcaggggctgcctgcgggagggtgttccctgctgtacgtgtgtgttcgtcatgggtgtgtgtgtgtgtgtgttgggggggtgcgtctgtgtgtgtgtctgtgtgtgtgcacgcgcagtgcctgtctgtgtgccgacttctgtctctctctcacgtctctctctctctctctctctctctctctctgtctcccttctcgctctttccgtggccctctctttctgtctctgtccgtctgtgtgtgcgtgcgcctcgggacacatgtgccctgtgcgccggagggtgggtttcttgcacgtcggcctttcttctggtcagcctctccccgcgtctctgcctgggtcgtgtggccggttggcagtcgtcgtcccggcggttccagtttgggggtctgtgaaggcctgggcaacgtgggcatcggcgtcggacccgcaggggttttcatcccctccccatccggagcagcctctttgctaggctggatccagacgagcgctccccaaccaaggacaacggcctcccaggcgctcatcgtccacccgcaggagggtgcccgcagagcttcaagaaggtggttgtcacgcctgtcgccctctgccctcatcgagaaatgtagccacagctcgacgcagggacggagaaggaagccggcaaggggatggggcaagcatgtctgtctctcaaaggctggccttcctggccgagtcacccgtttgacactcctccccggatgccggtggtggtggcatggcccccccgtatcctgcctgggctctggcctctgctctgacctccctcttgctgtgtctgccccgtctctgagaagcctggcggcttcttagtgtggctcagtgtcttccacaaagaagacttccccgtccatcagggagaaacctcgtggcggtccgcgtcatgattgtttccctctccacacctctttctggatgattgggcagctgtggtgatcctggagctctgggcttccatacctgtgtgggacagggaagctctctcggtctccatggcccaagtgatggctgcacgctcggtccaggaagaggcggaggcaagcccaccgctcctgacattggccttctaggaaaggcggtgttgcatcccacctgcacttcctctctgattcttgagggccaaccgcttcctccgctcctggggaaagtgccttctagcaccgaatcttttggctgccacggatgtcagggagccaacgggactgggttttggctgggtgcaggggaggttgcgtcaggggtacctagccggcggcgggctgggggtggggtgtactttgtccaaacctctcggctcctctggcgggcctccctgaacgtggcgtggactcgcgcacaggccctgtctcgcaggttttcaggtgcgcttggcttttcctccgctttgtggggcaggtctccagtggccccccgggcgcacgcctggacatcactgtccgtctcgtcgtcgccccctacggcctcaaagacacacgctgcctgcatgtgctcttgggggacgacagtgccacatgtggacacactggctccagctcggactcgcctctgtctctctttgcccgtgtcgccggaagccgcctcgggttgccggagccctcgggccttggagatgaaggcaggcccctgctcctgccaggaaggagggaggcagtgggctcatgggtcggtgcctttgcagccgacagcacgccttgcggccctggggatcttcctgtgccccggcgagaccctttccgcctcactgcattggaaccccattcccgatcacccgctgggatccatcatcggaccccaagaggagtccgcgcagcccagccggcaccccgaagctcctccttcagtgggaaccgaagcagaagagcgatcaaggaggtcctcaccacaggactcctatgggtccgaccatgggtctcccgcaggcccctctggcagtcctctccccacccgccgcctcgggctgcgccttcgccgccgccgccgcaacctccagcaccgccgccccaggccccgcagccgccgcgtcgccgccattttttaaagggtccgcagcctgactctgcggagtaagggggggtggagcgggggagtcggcctcgccagcgcgcatgcgcgaggcccgagccgccgcttgggtcacagtgaaagccaccgttgcccggggatgggtccctgacacttggggaagtaggagccctgtgtgatcgtgcgtctgagtctgggctgagaccagtcctggccagggcagttaccaggacggtctccggaggccgggattcgcggagggtccagcagcaggaagaaaccccaggaggaagaaacctcagacagatcgccggcgaggcagcgcgggatcccagcctcaggcgtgcgcggacggtgtgcgggtgagtctccccaaaagtggagcccttgtgatgacgagcacaggtccgcctgcgtgcccgtgggctgctctctcaccggtggctctcagtcgcggagagcagaacccggcagcttcaggggctgcctgcgggagggtgttccctgctgtacgtgtgtgttcgtcatgggtgtgtgtgtgtgtgtgttggggggggtgcgtctgtgtgtgtgtctgtgtgtgtgcgcgcgcagtgcctgtctgtgtgccgacttctgtctctctctcacgtctctctctctctctctctctctctctctctctctctgtctcccttctcgctctttccgtggccctctctttctgtctctgtccgtctgtgtgtgcgtgcgcctcgggacacatgtgccctgtgcgccggagggtgggtttcttgcacgtcggcctttcttctggtcagcctctccccgcgtctctgcctgggtcgtgtggccggttggcagtcgtcgtcccggcggttccagtttgggggtctgtgaaggcctgggcaacgtgggcatcggcgtcggacccgcaggggttttcatcccctccccatccggagcagcctctttgctaggctggatccagacgagcgctccccaaccaaggacaacggcctcccaggcgctcatcgtccacccgcaggagggtgcccgcagagcttcaagaaggtggttgtcacgcctgtcgccctctgccctcatcgagaaatgtagccacagctcgacgcagggacggagaaggaagccggcaaggggatggggcaagcatgtctgtctctcaaaggctggccttcctggccgagtcacccgtttgacactcctccccggatgccggtggtggtggcatggcccccccgtatcctgcctgggctctggcctctgctctgacctccctcttgctgtgtctgccccgtctctgagaagcctggcggcttcttagtgtggctcagtgtcttccacaaagaagacttccccgtccatcagggagaaacctcgtggcggtccgcgtcatgattgtttccctctccacacctctttctggatgattgggcagctgtggtgatcctggagctctgggcttccatacctgtgtgggacagggaagctctctcggtctccatggcccaagtgatggctgcacgctcggtccaggaagaggcggaggcaagcccaccgctcctgacattggccttctaggaaaggcggtgttgcatcccacctgcacttcctctctgattcttgagggccaaccgcttcctccgctcctggggaaagtgccttctagcaccgaatcttttggctgccacggatgtcaggagccaacgggactgggttttggctgggtgcaggggaggttgcgtcaggggtacctagccggcggcgggctgggggtggggtgtactttgtccaaacctctcggctcctctggcgggcctccctgaacgtggcgtggactcgcgcacaggccctgtctcgcaggttttcaggtgcgcttggcttttcctccgctttgtggggcaggtctccagtggccccccgggcgcacgcctggacatcactgtccgtctcgtcgtcgccccctacggcctcaaagacacacgctgcctgcatgtgctcttgggggacgacagtgccacatgtggacacactggctccagctcggactcgcctctgtctctctttgcccgtgtcgccggaagccgcctcgggttgccggagccctcgggccttggagatgaaggcaggcccctgctcctgccaggaaggagggaggcagtgggctcatgggtcggtgcctttgcagccgacagcacgccttgcggccctggggatcttcctgtgccccggcgagaccctttccgcctcactgcattggaaccccattcccgatcacccgctgggatccatcatcggaccccaagaggagtccgcgcagcccagccggcaccccgaagctcctccttcagtgggaaccgaagcagaagagcgatcaaggaggtcctcaccacaggactcctatgggtccgaccatgggtctcccgcaggcccctctggcagtcctctccccacccgccgcctcgggctgcgccttcgccgccgccgccgcaacctccagcaccgccgccccaggccccgcagccgccgcgtcgccgccattttttaaagggtccgcagcctgactctgcggagtaagggggggtggagcgggggagtcggcctcgccagcgcgcatgcgcgaggcccgagccgccgcttgggtcacagtgaaagccaccgttgcccggggatgggtccctgacacttggggaagtaggagccctgtgtgatcgtgcgtctgagtctgggctgagaccagtcctggccagggcagttaccaggacggtctccggaggccgggattcgcggagggtccagcagcaggaagaaaccccaggaggaagaaacctcagacagatcgccggcgaggcagcgcgggatcccagcctcaggcgtgcgcggacggtgtgcgggtgagtctccccaaaagtggagcccttgtgatgacgagcacaggtccgcctgcgtgcccgtgggctgctctctcaccggtggctctcagtcgcggagagcagaacccggcagcttcaggggctgcctgcgggagggtgttccctgctgtacgtgtgtgttcgtcatgggtgtgtgtgtgtgtgtgttggggggggtgcgtctgtgtgtgtgtctgtgtgtgtgcgcgcgcagtgcctgtctgtgtgccgacttctgtctctctctcacgtctctctctctctctctctctctctctctctctctctctctctcgctctctctctctctgtctcccttctcgctctttccgtggccctctctttctgtctctgtccgtctgtgtgtgcgtgcgcctcgggacacatgtgccctgtgcgccggagggtgggtttcttgcacgtcggcctttcttctggtcagcctctccccgcgtctctgcctgggtcgtgtggccggttggcagtcgtcgtcccggcggttccagtttgggggtctgtgaaggcctgggcaacgtgggcatcggcgtcggacccgcaggggttttcatcccctccccatccggagcagcctctttgctaggctggatccagacgagcgctccccaaccaaggacaacggcctcccaggcgctcatcgtccacccgcaggagggtgcccgcagagcttcaagaaggtggttgtcacgcctgtcgccctctgccctcatcgagaaatgtagccacagctcgacgcagggacggagaaggaagccggcaaggggatggggcaagcatgtctgtctctcaaaggctggccttcctggccgagtcacccgtttgacactcctccccggatgccggtggtggtggcatggcccccccgtatcctgcctgggctctggcctctgctctgacctccctcttgctgtgtctgccccgcctctgagaagcctggcggcttcttagtgtggctcagtgtcttccacaaagaagacttccccgtccatcagggagaaacctcgtggcggtccgcgtcatgattgtttccctctccacacctctttctggatgattgggcagctgtggtgatcctggagctctgggcttccatacctgtgtgggacagggaagctctctcggtctccatggcccaagtgatggctgcacgctcggtccaggaagaggcggaggcaagcccaccgctcctgacattggccttctaggaaaggcggtgttgcatcccacctgcacttcctctctgattcttgagggccaaccgcttcctccgctcctggggaaagtgccttctagcaccgaatgttttggctgccacggatgtcagggagccaacgggactgggttttggctgggtgcaggggaggttgcgtcaggggtacctagccggcggcgggctgggggtggggtgtactttgtccaaacctctcggctcctctggcgggcctccctgaacgtggcgtggactcgcgcacaggcccctgtctcgcaggttttcaggtgcgcttggcttttcctccgctttgtggggcaggtctccagtggccccccgggcgcacgcctggacatcactgtccgtctcgtcgtcgccccctacggcctcaaagacacacgctgcctgcatgtgctcttgggggacgacagtgccacatgtggacacactggctccagctcggactcgcctctgtctctctttgcccgtgtcgccggaagccgcctcgggttgccggagccctcgggccttggagatgaaggcaggcccctgctcctgccaggaaggagggaggcagtgggctcatgggtcggtgcctttgcagccgacagcacgccttgcggccctggggatcttcctgtgccccggcgagaccctttccgcctcactgcattggaaccccattcccgatcacacgctgggatccatcatcggaccccaagaggagtccgcgcagcccagccggcaccccgaagctcctccttcagtgggaaccgaagcagaagagcgatcaaggaggtcctcaccacaggactcatgggtccgaccatgggtctcccgcaggcccctctggcagtcctcttcccacccgccgcctcgggctgcgccttcgccgccgccgccgcaacctccagcaccgccgccccaggccccgcagccgccgcgtcgccgccattttttaaagggtccgcagcctgactctgcggagtaagggggggtggagcgggggagtcggcctcgccagcgcgcatgcgcgaggcccgagccgccgcttgggtcacagtgaaagccaccgttgcccggggatgggtccctgacacttggggaagtaggagccctgtgtgatcgtgcgtctgagtctgggctgagaccagtcctggccagggcagttaccaggacggtctccggaggccgggattcgcggagggtccagcagcaggaagaaaccccaggaggaagaaacctcagacagatcgccggcgaggcagcgcgggatcccagcctcaggcgtgcgcggacggtgtgcgggtgagtctccccaaaagtggagcccttgtgatgacgagcacaggtccgcctgcgtgcccgtgggctgctctctcaccggtggctctcagtcgcggagagcagaacccggcagcttcaggggctgcctgcgggagggtgttccctgctgtacgtgtgtgttcgtcatgggtgtgtgtgtgtgtgtgttggggggggtgcgtctgtgtgtgtgtctgtgtgtgtgcgcgcgcagtgcctgtctgtgtgccgacttctgtctctctctcacgtctctctctctctctctctctctctctctctctctctctgtctcccttctcgctctttccgtggccctctctttctgtctctgtccgtctgtgtgtgcgtgcgcctcgggacacatgtgccctgtgcgccggagggtgggtttcttgcacgtcggcctttcttctggtcagcctctccccgcgtctctgcctgggtcgtgtggccggttggcagtcgtcgtcccggcggttccagtttgggggtctgtgaaggcctgggcaacgtgggcatcggcgtcggacccgcaggggttttcatcccctccccatccggagcagcctctttgctaggctggatccagacgagcgctccccaaccaaggacaacggcctcccaggcgctcatcgtccacccgcaggagggtgcccgcagagcttcaagaaggtggttgtcacgcctgtcgccctctgccctcatcgagaaatgtagccacagctcgacgcagggacggagaaggaagccggcaaggggatggggcaagcatgtctgtctctcaaaggctggccttcctggccgagtcacccgtttgacactcctccccggatgccggtggtggtggcatggcccccccgtatcctgcctgggctctggcctctgctctgacctccctcttgctgtgtctgccccgcctctgagaagcctggcggcttcttagtgtggctcagtgtcttccacaaagaagacttccccgtccatcagggagaaacctcgtggcggtccgcgtcatgattgtttccctctccacacctctttctggatgattgggcagctgtggtgatcctggagctctgggcttccatacctgtgtgggacagggaagctctctgggtctccatggcccaagtgatggctgcacgctcggtccaggaagaggcggaggcaagcccaccgctcctgacattggccttctaggaaaggcggtgttgcatcccacatgcacttcctctctgattcttgagggccaaccgcttcctccgctcctggggaaagtgccttctagcaccgaatcttttggctgccacggatgtcagggagccaacgggactgggttttggctgggtgcaggggaggttgcgtcaggggtacctagccggcggcgggctgggggtggggtgtactttgtccaaacctcttggctcctctggcgggcctccctgaacgtggcgtggactcgcgcacaggccctgtctcgcaggttttcaggtgcgcttggcttttcctccgctttgtggggcaggtctccagtggccccccgggcgcacgcctggacatcactgtccgtctcgtcgtcgccccctacggcctcaaagacacacgctgcctgcatgtgctcttgggggacgacagtgccacatgtggacacactggctccagctcggactcgcctctgtctctctttgcccgtgtcgccggaagccgcctcgggttgccggagccctcgggccttggagatgaaggcaggcccctgctcctgccaggaaggagggaggcagtgggctcatgggtcggtgcctttgcagccgacagcacgccttgcggccctggggatcttcctgtgccccggcgagaccctttccgcctcactgcattggaaccccattcccgatcacccgctgggatccatcatcggaccccaagaggagtccgcgcagcccagccggcaccccgaagctcctccttcagtgggaaccgaagcagaagagcgatcaaggaggtcctcaccacaggactcctatgggtccgaccctgggtctcccgcaggcccctctggcagtcctcttcccacccgccgcctcgggctgcgccttcgccgccgccgccgcaacctccagcaccgccgccccaggccccgcagccgccgcgtcgccgccattttttaaagggtccgcagcctgactctgcggagtaacggggggtggagcgggggagtcggcctcgccagcgcgcatgcgcgaggcccgagccgccgcttgggtcacagtgaaagccaccgttgcccggggatgggtccctgacacttggggaagtaggagccctgtgtgatcgtgcgtctgagtctgggctgagaccagtcctggccagggcagttaccaggacggtctccggaggccgggattcgcggagggtccagcagcaggaagaaaccccaggaggaagaaacctcagacagatcgccggcgaggcagcgcgggatcccagcctcaggcgtgcgcggacggtgtgcgggtgagtctccccaaaagtggagcccttgtgatgacgagcacaggtccgcctgcgtgcccgtgggctgctctctcaccggtggctctcagtcgcggagagcagaacccggcagcttcaggggctgcctgcgggagggtgttccctgctgtacgtgtgtgttcgtcatgggtgtgtgtgtgtgtgtgttggggggggtgcgtctgtgtgtgtgtctgtgtgtgtgcgcgcgcagtgcctgtctgtgtgccgacttctgtctctctctcacgtctctctctctctctctctctctctctctctctctctctctctctctctgtctcccttctcgctctttccgtggccctctctttctgtctctgtccgtctgtgtgtgcgtgcgcctcgggacacatgtgccctgtgcgccggagggtgggtttcttgcacgtcggcctttcttctggtcagcctctccccgcgtctctgcctgggtcgtgtggccggttggcagtcgtcgtcccggcggttccagtttgggggtctgtgaaggcctgggcaacgtgggcatcggcgtcggacccgcaggggttttcatcccctccccatccggagcagcctctttgctaggctggatccagacgagcgctccccaaccaaggacaacggcctcccaggcgctcatcgtccacccgcaggagggtgcccgcagagcttcaagaaggtggttgtcacgcctgtcgccctctgccctcatcgagaaatgtagccacagctcgacgcagggacggagaaggaagccggcaaggggatggggcaagcatgtctgtctctcaaaggctggccttcctggctgagtcacccgtttgacactcctccccggatgccggtggtggtggcatggcccccccgtatcctgcctgggctctggcctctgctctgacctccctcttgctgtgtctgccccgtctctgagaagcctggcggcttcttagtgtggctcagtgtcttccacaaagaagacttccccgtccatcagggagaaacctcgtggcggtccgcgtcatgcttgtttccctctccacacctctttctggatgattgggcagctgtggtgatcctggagctctgggcttccatacctgtgtgggacagggaagctctctcggtctccatggcccaagtgatggctgcacgctcggtccaggaagaggcggaggcaagcccaccgctcctgacattggccttctaggaaaggcggtgttgcatcccacctgcacttcctctctgattcttgagagccaaccgcttcctccgctcctggggaaagtgccttctagcaccgaatgttttggctgccacggatgtcagggagccaacgggactgggttttggctgggtgcaggggaggttgcgtcaggggtacctagccggcggcgggctgggggtggggtgtactttgtccaaacctctcggctcctctggcgggcctccctgaacgtggcgtggactcgcgcacaggccctgtctcgcaggttttcaggtgcgcttggcttttcctccgctttgtggggcaggtctccagtggccccccgggcgcacgcctggacatcactgtccgtctcgtcgtcgccccctacggcctcaaagacacacgctgcctgcatgtgctcttgggggacgacagtgccacatgtggacacgctggctccagctcggactcgcctctgtctctctttgcccgtgtcgccggaagccgcctcgggttgccggagccctcgggccttggagatgaaggcaggcccctgctcctgccaggaaggagggaggcagtgggctcatgggtcggtgcctttgcagccgacagcacgccttgcggccctggggatcttcctgtgccccggcgagaccctttccgcctcactgcattggaaccccattcccgatcacccgctgggatccatcatcggaccccaagaggagtccgcgcagcccagccggcaccccgaagctcctccttcagtgggaaccgaagcagaagagcgatcaaggaggtcctcaccacaggactcctatgggtccgaccatgggtctcccgcaggcccctctggcagtcctctccccacccgccgcctcgggctgcgccttcgccgccgccgccgcaacctccagcaccgccgccccaggccccgcagccgccgcgtcgccgccattttttaaagggtccgcagcctgactctgcggagtaagggggggtggagcgggggagtcggcctcgccagcgcgcatgcgcgaggcccgagccgccgcttgggtcacagtgaaagccaccgttgcccggggatgggtccctgacacttggggaagtaggagccctgtgtgatcgtgcgtctgagtctgggctgagaccagtcctggccagggcagttaccaggacggtctccggaggccgggattcgcggagggtccagcagcaggaagaaaccccaggaggaagaaacctcagacagatcgccggcgaggcagcgcgggatcccagcctcaggcgtgcgcggacggtgtgcgggtgagtctccccaaaagtggagcccttgtgatgacgagcacaggtccgcctgcgtgcccgtgggctgctctctcaccggtggctctcagtcgcggagagcagaacccggcagcttcaggggctgcctgcgggagggtgttccctgctgtacgtgtgtgttcgtcatgggtgtgtgtgtgtgtgtgttgggggggtgcgtctgtgtgtgtgtctgtgtgtgtgcgcgcgcagtgcctgtctgtgtgccgacttctgtctctctctcacgtctctctctctctctctctctctctctctctctccctctccctctctcccttctcgctctttccgtggccctctctttctgtctctgtccgtctgtgtgtgcgtgcgcctcgggacacatgtgccctgtgcgccggagggtgggtttcttgcacgtcggcctttcttctggtcagcctctccccgcgtctctgcctgggtcgtgtggccggttggcagtcgtcgtcccggcggttccagtttgggggtctgtgaaggcctgggcaacgtgggcatcggcgtcggacccgcaggggttttcatcccctccccatccggagcagcctctttgctaggctggatccagacgagcgctccccaaccaaggacaacggcctcccaggcgctcatcgtccacccgcaggagggtgcccgcagagcttcaagaaggtggttgtcacgcctgtcgccctctgccctcatcgagaaatgtagccacagctcgacgcagggacggagaaggaagccggcaaggggatggggcaagcatgtctgtctctcaaaggctggccttcctggccgagtcacccgtttgacactcctccccggatgccggtggtggtggcatggcccccccgtatcctgcctgggctctggcctctgctctcacctccctcttgctgtgtctgccccgtctctgagaagcctggcggcttcttagtgtggctcagtgtcttccacaaagaagacttccccgtccatcagggagaaacctcgtggcggtccgcgtcatgattgtttccctctccacacctctttctggatgattgggcagctgtggtgatcctggagctctgggcttccatacctgtgtgggacagggaagctctctcggtctccatggcccaagtgatggctgcacgctcggtccaggaagaggcggaggcaagcccaccgctcctgacattggccttctaggaaaggcggtgttgcatcccacctgcacttcctctctgattcttgagggccaaccgcttcctccgctcctggggaaagtgccttctagcaccgaatcttttggctgccacggatgtcagggagccaacgggactgggttttggctgggtgcaggggaggttgcgtcaggggtacctagccggcggcgggctgggggtggggtgtactttgtccaaacctctcggctcctctggcgggcctccctgaacgtggcgtggactcgcgcacaggccctgtctcgcaggttttcaggtgcgcttggcttttcctccgctttgtggggcaggtctccagtggccccccgggcgcacgcctggacatcactgtccgtctcgtcgtcgccccctacggcctcaaagacacacgctgcctgcatgtgctcttgggggacgacggtgccacatgtggacacactggctccagctcggactcgcctctgtctctctttgcccgtgtcgccggaagccgcctcgggttgccggagccctcgggccttggagatgaaggcaggcccctgctcctgccaggaaggagggaggcagtgggctcatgggtcggtgcctttgcagccgacagcacgccttgcggccctggggatcttcctgtgccccggcgagaccctttccgcctcactgcattggaaccccattcccgatcacccgctgggatccatcatcggaccccaagaggacaccccaagaggagtccgcgcagcccagccggcaccccgaagctcctccttcagtgggaaccgaagcagaagagcgatcaaggaggtcctcaccacaggactcctatgggtccgaccctgggtctcccgcaggcccctctggcagtcctcttcccacccgccgcctcgggctgcgccttcgccgccgccgccgcaacctccagcaccgccgccccaggccccgcagccgccgcgtcgccgccattttttaaagggtccgcagcctgactctgcggagtaagggggggtggagcgggggagtcggcctcgccagcgcgcatgcgcgaggcccgagccgccgcttgggtcacagtgaaagccaccgttgcccggggatgggtccctgacacttggggaagtaggagccctgtgtgatcgtgcgtctgagtctgggctgagaccagtcctggccagggcagttaccaggacggtctccggaggccgggattcgcggagggtccagcagcaggaagaaaccccaggaggaagaaacctcagacagatcgccggcgaggcagcgcgggatcccagcctcaggcgtgcgcggacggtgtgcgggtgagtctccccaaaagtggagcccttgtgatgacgagcacaggtccgcctgcgtgcccgtgggcggctctctcaccgctggctctcagtcgcggagagcagaacccggcagcttcaggggctgcctgcgggagggtgttccctgctgtacgtgtgtgttcgtcatgggtgtgtgtgtttgtgtgttggggggggtgcgtctgtgtgtgtgcgcgcgcagtgcctgtctgtgtgcggacttctgtctctctctcaggtctctctctctctctctctctcccttctcgctctttccgtggccctctctttctgtctctgtccgtctgtgtgtgcgtgcgcctcgggacacatgtgccctgtgcgccggagggtgggtttcttgcacgtcggcctttcttctggtcagcctctccccgcgtctctgcctgggtcgtgtggccggttggcagtcgtcgtcccggcggttccagtttgggggtctgtgaaggcctgggcaacgtgggcatcggcgtcggacccgcaggggttttcatcccctccccatccggagcagcctctttgctaggctggatccagacgagcgctccccaaccaaggacaacggcctcccaggcgctcatcgtccacccgcaggagggtgcccgcagagcttcaagaaggtggttgtcacgcctgtcgccctctgccctcatcgagaaatgtagccacagctcgacgcagggacggagaaggaagccggcaaggggatggggcaagcatgtctgtctctcaaaggctggccttcctggccgagtcacccgtttgacactcctccccggatgccggtggtggtggcatggcccccccgtatcctgcctgggctctggcctctgctctgacctccctcttgctgtgtctgccccgtctctgagaagcctggcggcttcttagtgtggctcagtgtcttccacaaagaagacttccccgtccatcagggagaaacctcgtggcggtccgcgtcatgcttgtttccctctccacacctctttctggatgattgggcagctgtggtgatcctggagctctgggcttccatacctgtgtgggacagggaagctctctcggtctccatggcccaagtgatggctgcacgctcggtccaggaagaggcggaggcaagcccaccgctcctgacattggccttctaggaaaggcggtgttgcatcccacctgcacttcctctctgattcttgagggccaaccgcttcctccgctcctggggaaagtgccttctagcaccgaatcttttggctgccacggatgtcagggagccaacgggactgggttttggctgggtgcaggggaggttgcgtcaggggtacctagccggcggcgggctgggggtggggtgtactttgtccaaacctctcggctcctctggcgggcctccctgaacgtggcgtggactcgcgcacaggccctgtctcgcaggttttcaggtgcgcttggcttttcctccgctttgtggggcaggtctccagtggccccccgggcgcacgcctggacatcactgtccgtctcgtcgtcgccccctacggcctcaaagacacacgctgcctgcatgtgctcttgggggacgacagtgccacatgtggacacactggctccagctcggactcgcctctgtctctctttgcccgtgtcgccggaagccgcctcgggatgccggagccctcgggccttggagatgaaggcaggcccctgctcctgccaggaaggagggaggcagtgggctcatgggtcggtgcctttgcagccgacagcacgccttgcggccctggggatcttcctgtgccccggcgagaccctttccgcctcactgcattggaaccccattcccgatcacccgctgggatccatcgtcggaccccaagaggagtccgcgcagcccagccggcaccccgaagctcctccttcagcgggaacggaagcagaagagcgatcaaggaggtcctcaccacaggactcctatgggtccgaccctgggtctcccgcaggcccctctggcagtcctcttcccacccgtcgcctcgggctgcgccgccgccgccgccgccgcaacctccagcaccgccgccccaggccccgcagccgccgcgtcgccgccattttttaaagggtccgcagcctgactctgcggagtaagggggggtggagcggggggagtcggcctcgccagcgcgcaggcgcgaggcccgagccgccgcttgggtcacagtgaaagccaccgttgcccggggatgggtccctgacacttggggaagtaggagccctgtgtgatcgtgcgtctgagtctgggctgagaccagtcctggccagggcagttaccaggacggtctccggaggccgggattcgcggagggtccagcagcaggaagaaaccccaggaggaagaaacctcagacagatcgccggcgaggcagcgcgggatcccagcctctggcgtgcgcggacggtgtgcgggtgagtctccccaaaagtggagcccttgtgatgacgagcacaggtccgcctgtgtgcccgtgggctgctctctcaccggtggctcgtagtcgcg

SEQ ID NO: 41 - DNA, 2730 bp, Homo Sapiens
gtctccactcgcgcgcccacgtgcgtggataaacgcgggaattcggcagccctcaacgtcactctgcagagatttccgggctgtgagagagttggggtgtgcggcgggggaggggagggtctgatatcttcaggttgagagtcaagtcctgggggagcggcatgggcgggggtggccggggggaggcggaggatggagcgcgaaccagaaagcgcagaggaccctcggcccgcgccgcacccgctgtgattagctccagaggcgcgatccgggagggcggactctttcttaaccctcattgtctcctcctccctcttcctttttaaaagacgccttgcgggcagagctgtcagcaaccccgcggccgtttgtacttggccgcggcggagctgactcctgctcctgtgacagataggggctggggctgagcggccgcctgtctggggtactcgcacgtggggaacaaattcttttcctccggctcctctcgggacccggcgatcgccacaggttgggactctgtgcggcgctggagttggcagccccgggcgctatggctcccttgaggagtggggagggaggtggccggggggttggcgcgcccctcgcgcggggagcgctatgagccgggcgaagggcggcagcgacagccccagcaactgcctctgccggcgcctcccgcaggccctcgccaactcgccccgcgcaccatgctgactcccggcctgcggaactcgtagtgcagcccctgtcgcctccccggcccctgctatcccacgcaggactggcttcggccgccggggccagcagcttgcgacgtgtccctggggaggcggaatcgctgtgcgccctgagcccgggctcagcccttcgctttccagctgcgtcctgctcccggccgcccagggagcccagtggcgatgagggcactgctggcgctttgccttctccttggctggctgcgctggggcccggcgggcgcccagcagtccggagagtactgccacggctgggtggacgtgcagggcaactaccacgagggcttccagtgcccagaggacttcgacacgctggacgctaccatctgctgcggctcctgcgcgctccgctactgttgcgccgcggccgacgccaggctggagcagggcggctgcaccaacgaccgccgcgaactggagcacccaggcatcactgcgcgtaagtgcggggccctcggggacatatccccgcccgcctaacggcggcggctgcatgtgtgcgcgggaggatgcacagacccaggcaggtctatgcgccttcctgggtctgtgcgccagggggacgcggccgggtgggggaatcaagggatgagtgggtggtcgcgtttcagatcatggtcctctattcatttgcagtcccgcttcccgccacttgcggtctctgcgggtcggcccgcagggaaagtttgccagggacagtgaggagcgcggggcttgtgcctggtagccggggggaagacagctggagctcccgggagaagggtagtgcgggtaaagccagggtagacttgggttttggtggaggggccgagggtgtcccattgctcgcccttgtcacttcgggagcttcgggaagtgccgaatgcagggaatcgcgactcttgtcgcgcgctcatttgcagcccttcagggctaagaaaccccagtcactttttttttctgtcttaatgatagcgtttctaagccacggccccgttctgcagacttcctttcaattctctgcatcgaattaccctctccggcccaccccctattgtcacgcctttcagaaatgcccaggtcttcgaggtggagatttagaaacaagggtcgaaggggcttccccgccccctattctcacttcggaaaacacgggtcaaatttccgctgacttcagagcggaataaatcacgaccccagcagagaaaatttacaccttgaaaaaaagttttccacctgaatcggaacatcagggaaacgctttagagcttgaggcgagggttttatggccagggaaaccggagaagcgggcggagctgagagcgggtgacaccccaggactccagagagccgaggtctggagcccgcaagagaaggtcgccgggaaagggaagagaggctggagagatcattaagggttccccaacggcccctccccgcaaactgataacccagaggacaggggagtctgccctccattagtgctccactagagggtgaatgttgggggtcaacatttccaatctagaggattctggaagtagttctggagaaaagatgctcagcggaaagtagggaaatctaggccctcctggcctgttagaaaaatatagactcttccccacggcttcactcgctcaccctgggggacccagctgccctctgggagtaagtgcaattgcccagtctgcagcacgggcttcctctgcgctccctactcggctcggatgccagaggacagcagaagggagaggcagtctccacactcactgagtctgggatcaggcaaaccctgatggaccttggctctgtcacttgccggcggtgtaacttgggcaagttacttaactgctctggatacctcttctcagttctaaagtgggcatattgctctcaaaggagttaagttgttggtgacgtgagagtgtatgaatgctggagcgcagggctcagtaaatggtagttacttacctttgccttgccttgcacgctg

SEQ ID NO: 42 - DNA, 2396 bp, Homo Sapiens
atttaccatcttaatcattttaggtgtacagatcataagtattaactatattcacattgctgtgcaacagatctgcagaaattatccatcttgcaaaactgtagctattgaataacagctccccattttcctgcctcttgtggtggttttaaatacaatgcaatacatactagctgaaaatggaaaaaagaagtatatgaaaatgttaaatgcatagcacaaaaaatgaataatagggtcactttggttataactttaaatgagaaaactcaaagtaaaacaacaatctatgatatatcatataaaatgcacaatttaaaatttttaaaatttaatattaacaaaaatatatgtaatacaccacataagtattcaataaaactgaatacaattatgtttaatttttttaaactgtgaaaaagatcctattaacttttgaatatttacgcaaggaaaccaagtacatctcttcttgaaaaagtttgattccaattttttttttctttttttttttttgagacagagtcttgctctatcacccaggctggagtacagtggcgtgatatcagctcactgcaagctccgcctcccgggttcacgccattctcctgcctcagcctcccgagtagctgggactataggcgcccgccactgtgcccagctaattttcttttgtatttttagtagagacggggtttcaccgtggtcttgatctcttgacctcgtgatctgcccgcctcggcctcccaaagtgccaggattacaggcgtgagccaccacgcccagccagtttgattccaattttaacagacaggtgtttttgacaaccagtttattttcttactgaaattttctttttctttttttaaaaaattttaaatctttaatttccgttttcacttattttcttcttgcttccaaaaggaaaggagtgcgtagctctgttgcctgtacatcgtccacagcccctggctcggggcagggtcccctaggccgcccgggggtccacatgcagcccctggggggccggcgcggggtgaggtccggccggttggggccgccgctaggcgcgctggctgggcagctcctgggagatgaagcgacgcaggcgctccaggtactggctgtagagctcgatgtcgttgtgtccggcgccctccacccacagcggctccaccgccttggggcagcgctcgtagagcgccagcccgtgtgagaagtcgatcacctcgtcctctatgccgtggatgatgagcacgggcgacgtgatcttggacaccttctcgatgttagggaaggcgtcgaagcagtaggtcttggtgtcggggaaggcgacgcgcatgcccgaggtgagcggcgagtgcagcaccaccgcggcacactcgtagcgcgaggccaggtccacggtgggcaccgtgccgatgctctgcccgtacaggatgatgctgtccgggctgatgccgtacctggcggcgccggagcagggtcagccgcggcctccgaggcgcgcgcacccttcccaccagcgggcgtccccgggcccagctccggatgcgaccctctagtctccccactcagccaagtcagtgggtcaggcccaggctccacaccagtcccgagggccacccccagcccccaacaccgcggcggtgggcgaggccagcggccccgccccgttccctggcgctgccgttcactggcgtttcctagcaaggatctgcagggatcccgcctacggagtgcccctggggcaggggtaggggaggccctggcgcctgttctcctcctggtcacccctaggtgcacactgggaactgtgtgccccccacatcctgaatgcttcaggcctccctgcccgggttagaaagccgttcctggtgcactggccaggacagcggacactcttccttcctgcagcccttgcccacccccttggccatgaggaattcaggcagctgtgtccccagatgtctccacccaattttggactctcggagtccccacgcccaatgagatgccagtgcaacccaggtcagcatcgaaggtggtggctgcggaggtggcaccccctcccaccagcaccttcccttgggagtggacaagtcctcggccacctcagcaccaccagctcccacccagggccacccccacccccaggtcattggtgtgcggcccttgacccagctgatccagcaccagttacaaggcctcctcgtacccagtcccaaccacgcgggacccacctgccaccctgcccatgccaggaccccacaactctcctcccacacgctccaggctctgatcccaggcagacaccctcttgcaaggcaggagcatgggcaggtgtgcgtcccctctgcctggcattcggactccaccagcagggctgtccccgt

SEQ ID NO: 43 - DNA, 4660 bp, Homo Sapiens
gcgcgcctggggctctcccacagggggctttcgtgagccaggcagcgagggccgcccccgcgctgcagcccagccaggccgcgccggcagaggggatctcccaacctgccccggcgcgcggggatttcgcctacgccgccccggctcctccggacggggcgctctcccaccctcaggctcctcggtggcctccgcacccgggcaaaagccgggaggaccgggacccgcagcgcgacggcctgccgggcccctgcgcggtggcacagcctgggcccgctcaagcggggccgcagggccaaggggtgcttgcgccacccacgtcccaggggagtccgtggtggggctggggccggggtccccaggtcgccggggcggcgtgggaaccccaagccggggcagctccacctccccagcccgcgcccccggacgcctccgcgcggcaggggcagatgcaaggcatcccggcgccctcccaggcgctccaggagccggcgccctggtctgcactcccctgcggcctgctgctggatgagctcctggcgagcccggagtttctgcagcaggcgcaacctctcctagaaacggaggccccgggggagctggaggcctcggaagaggccgcctcgctggaagcacccctcagcgaggaagaataccgggctctgctggaggagctttaggacgcggggttgggacggggtcgggtggttcggggcagggcggtggcctctctttcgcggggaacgcctggctggctacggaggggcgtgtctccgccccgccccctccaccgggctgaccggcctgggattcctgccttctaggcctaggcccggtgagagactccacacagcggagaactgccattctttcctgggcatcccggggatcccagagccggcccaggtaccagcaggtgggccgcctactgcgcacgcgcgggtttgcgggcagccgcctgggctgtgggagcagcccgggcagagctctcctgcctctccaccagcccaccccgccgcctgaccgccccctccccacccccaccccccgcccccggaaaacgcgtcgtcccctgggctgggtggagacccccgtcccgcgaaacaccgggccccgcgcagcgtccgggcctgacaccgctccggcggctcgcctcctctgcgcccccgcgccaccgtcgcccgcccgcccgggcccctgcagccgcccaggtgccagcacggagcgcctggcggcggaacgcagaccccaggcccggcgcacaccggggacgctgagcgttccaggcgggagggaaggcgggcagagatggagagaggaacgggagacctagaggggcggaaggatgggcggagggacgttaggagggagggagggaggcagggaggcagggaggcagggaggaacggagggaaagacagagcgacgcagggactgggggcgggcgggagggagccggggacggggggaggaaggcagggaggaaaagcggtcttcggcctccgggagtagcgggacccccgccctccgggaaaacggtcagcgtccggcgcgggctgagggctgggcccacagccgccgcgccggccggcggggcaccacccattcgccccggttccggggcccagggagtgggcggtttcctccgggacaaaagaccgggactcgggttgccgtcgggttttcacccgcgcggttcacagaccgcacatccccaggctgagccctgcaacgcggcgcgaggccgacagccccggccacggaggagccacacgcaggacgacggaggcgtgattttggtttccgcgtggctttgccctctgcaaggcggcctgttgctcacgtctctccggcccccgaaaggctggccatgccgactgtttgctcccggagctctgcgggcacccggaaacatgcaggggagggtgcaagcccggcacggtgccttcgctctccttgccaggttccaaaccggccacactgcagactccccacgttgccgcacgcgggaatccatcgtcaggccatcacgccggggaggcatctcctctctggggtctcgctctggtcttctacgtggaaatgaacgagagccacacgcctgcgtgtgcgagaccgtcccggcaacggcgacgcccacaggcattgcctccttcacggagagagggcctggcacactcaagactcccacggaggttcagttccacactcccctccaccctcccaggctggtttctccctgctgccgacgcgtgggagcccagagagcggcttcccgttcccgcgggatccctggagaggtccggagagccggcccccgaaacgcgcccccctcccccctcccccctctcccccttcctcttcgtctctccggccccaccaccaccaccgccaccacgccctcccccaccaccccccccaccccacaccaccaccaccaccaccaccaccaccaccccgccggccggccccaggcctcgacgccctgggtcccttccggggtggggcgggctgtcccaggggggctcaccgccattcatgaaggggtggagcctgcctgcccgtgggcctttacaagggcggctggctggctggctggctgtccgggcaggcctcctggctgcacctgccgcagtgcacagtccggctgaggtgcacgggagcccgccggcctctctctgcccgcgtccgtccgtgaaattgcggccggggctcaccgcgatggccctcccgacaccttcggacagcaccctccccgcggaagcccggggacgaggacggcgacggagactcgtttggaccccgagccaaagcgaggccctgcgagcctgctttgagcggaacccgtacccgggcatcgccaccagagaacggctggcccaggccatcggcattccggagcccagggtccagatttggtttcagaatgagaggtcacgccagctgaggcagcaccggcgggaatctcggccctggcccgggagacgcggcccgccagaaggccggcgaaagcggaccgccgtcaccggatcccagaccgccctgctcctccgagcctttgagaaggatcgctttccaggcatcgccgcccgggaggagctggccagagagacgggcctcccggagtccaggattcagatctggtttcagaatcgaagggccaggcacccgggacagggtggcagggcgcccgcgcaggcaggcggcctgtgcagcgcggcccccggcgggggtcaccctgctccctcgtgggtcgccttcgcccacaccggcgcgtggggaacggggcttcccgcaccccacgtgccctgcgcgcctggggctctcccacagggggctttcgtgagccaggcagcgagggccgcccccgcgctgcagcccagccaggccgcgccggcagaggggatctcccaacctgccccggcgcgcggggatttcgcctacgccgccccggctcctccggacggggcgctctcccaccctcaggctcctcggtggcctccgcacccgggcaaaagccgggaggaccgggacccgcagcgcgacggcctgccgggcccctgcgcggtggcacagcctgggcccgctcaagcggggccgcagggccaaggggtgcttgcgccacccacgtcccaggggagtccgtggtggggctggggccggggtccccaggtcgccggggcggcgtgggaaccccaagccggggcagctccacctccccagcccgcgcccccggacgcctccgcgcggcaggggcagatgcaaggcatcccggcgccctcccaggcgctccaggagccggcgccctggtctgcactcccctgcggcctgctgctggatgagctcctggcgagcccggagtttctgcagcaggcgcaacctctcctagaaacggaggccccgggggagctggaggcctcggaagaggccgcctcgctggaagcacccctcagcgaggaagaataccgggctctgctggaggagctttaggacgcggggttgggacggggtcgggtggttcggggcagggcggtggcctctctttcgcggggaacgcctggctggctacggaggggcgtgtctccgccccgccccctccaccgggctgaccggcctgggattcctgccttctaggcctaggcccggtgagagactccacacagcggagaactgccattctttcctgggcatcccggggatcccagagccggcccaggtaccagcaggtgggccgcctactgcgcacgcgcgggtttgcgggcagccgcctgggctgtgggagcagcccgggcagagctctcctgcctctccaccagcccaccccgccgcctgaccgccccctccccacccccaccccccgcccccggaaaacgcgtcgtcccctgggctgggtggagacccccgtcccgcgaaacaccgggccccgcgcagcgtccgggcctgacaccgctccggcggctcgcctcctctgcgcccccgcgccaccgtcgcccgcccgcccgggcccctgcagccgcccaggtgccagcacggagcgcctggcggtcaaaagcatacctctgtctgtctttgcccgcttcctggctagacctgcgcgcagtgcgcaccccgggtgacgtgcaagggagctcgctggcctctctgtgcccttgttcgtccg

SEQ ID NO: 44 - DNA, 2427 bp, Homo Sapiens
tttcctggggtctgggtggggagccctttccagtaataaacatgagagggacagagaatgccagagagcttcctgttgggactgggatggctggagggcatcacagcactggtttcgaacactgaacggagaactgccatgcaacaagaacctgggcacatcagacccctgcaggcaccctcgggacccacagatcgcacactcgatgggcgctcgcaggacgtgaatggcatctcggtaacgccaagctccaccccagagccacagggtgcctttcaccaggctacggagcctcctgggccacactgctcagggacattctgcaggggaggaaattgctcttttttttttttcatgattcttgtatgaattctaattaagaaacattacattcagaattatagcactcacagtgatagttttcagaagactgtaacagcttctttgctacttaaggggtacagacggtgcagctgcttacctgaatgacttcttaaatgagtgactaccaccactctaattttcctagttgtagctctgttacaggttactgaccacaagtgttggcaaagaaactgttcttttaagcactttggcgctccctggagtgacggccattcccagcagctaaactgtatcatactcccactttaactctgtgactgtttcagtatttttaaaaatacaaatcgactctccaggaaaaaacaaaaaaacgaaaaaacttctcacttccttcaaatccctggtccaggctcacctgacctcctgcaagctgcccttcagggcaggtcccagccctacctgctgcgtctgcttctccaccccactccagctgagcaggcagagcctgtccttggaaacggcccggccacctgggagggaacaaacaggcactgcccagacccggagctgcaggcagggctcagcaggaccccaggcgggcacacaggggctcatctggagggacctgaggggcacaggctacagtcgggagagccccgggcaggcacacaggggctcatctggagggacctgaggggcacaggctacagtcaggagagcacagacaagaggcccccgaggccaccagggccgacttttactttatcctaaggatcagggacgcaaaaggattttaacaaagacggccacaccacctgctgcagaatgagtataaatgcccttcttagccttcgaggccggcactggcctcgctgacccctctaatcctgccacctgtgcagcaggcggcaacagggacaggcagacgacacagctggggccagaggacgacgcagagagacccacatcagagaccctcggggagtgacagagcccccgccccaaccccagtgagtgggacaggctgagtggggactgagcacgtctagggccagagtgggagggccagccgtgccggcttccaaagaggaccccgggaaacaaacaccctcccactcggcaaggacaaatcaagcaactgccgagacaggtgtccgcgtcccaacccaaggctgcccagacagacaagcgctcaccgccgcactgccctaacagctgctgagacacattcctgcagccgcctcagctagagccagggaggccctgggagaatggccttgcctgctctcagcctcctctcatcttcaggagccttttcccccctttaccctaactgacatctccgggcccctcatttgctcagagtctgctcagtggggcacccaacggtggacaggtgagagaggtgaggggctgggctgtcaccgcggccaagggagccatggccctccagcctgaacggcttctgcccgaaatcaggacacaaacacagcatcatacacagcagaaacagcccagaaaggccccagcccagatggcactggaataaacagttttccccaagtcactttaaaatgaaagttttgggctacctacttctaaagaggacttcaggacagttccaggagttcctccatgacacaccccatggagaatgcttggctgctgcgtttactcaatgtagccattgaacagaaactcaagagcgttgctctgccagcctgaaaccttcttcatgcttccagccatcagggtttcagccaggtcagaaacaacagaggcagtaggctcttccagaacagcagtgtgaggctctccacagaccctctccagcaacatcactgccagtggtgaacattacaaacagcacccacttaaagtccctaacgtgtcttagggacacacggcgaatggagaaacgcttatccaagaaaaccacctaagtggcagcaggaacagcaacttcgtgacacttgggccacaacctgcttccccatccccatgtgacaaaagctctactcccagcaggcaaccgagaagacaggctccctctcccccagtgccactgcagcagtggcgggc

SEQ ID NO: 45 - DNA, 2350 bp, Homo Sapiens
cagatgcactggtgagaccaggccctggctgtgaccttgggcctgcatcatgacccccgacccttgacccagatcacaactatgacctggccgtaacctcctgacctggacctcagtccctcagtccccagagcctgtgactcctgaccctgacctggaccacaactcttgaccctgaatgtgactcctgagacccaacttgacagtaacatttgaccctaaccatcacccttgatgatagtccctgcccataccctgatagcaattgtgaccctcatgactctggccctgaatgtgacctataactcctgaatttgactgtgacatttgaccctaatcataaccactaaccatagcactgaccataaccttgactgtgtgactcttggtcctatctctttcacagcccctgcctcttctcagaatcccttctctggaacctggttgggttcataatccctgaccctggcccctgacttgaggcagaattctggaccctgactataacttctgatcctaactggattcagattccagtcactaactctgacccatggctcagccgaatcccatccaatgatcctagtttataatacttgactggtcccttgccctagttgatttctgatccctgtctgatccctctcctgactccaaaatcctggcacaggtagttcctagaaacctagacccacaggacttgcaaccatggtccccggaacccgagaaccttggtcagccctacccacctctgccatagagccctcccccagcctccaactcatgagacttcccaccacctcccccagacaccctactccaaggggattggtcgggtgtgtcccgagactggaccctttctgaacacccccaccccccacagatgtggacgaatgcagttcgggtgcccctccctgtggtccccacggccactgcactaacaccgaaggctccttccgctgcagctgcgcgccaggctaccgggcgccgtcgggtcggcccgggccctgcgcaggtgagcagcatagggacccgccagagagtctgggagtagggcctgggttccagggcaaagccggctggaaaggtggaggcgggaccaaggcgctgtgggaggagcttagaaacctggcattggtgggggcggggttactgcgatgtgggcggagcttgtctgggaggccgggtcccgtgactccgcccaatctcccgcgtaccctagacgtgaacgagtgcctggagggcgatttctgcttccctcacggcgagtgcctcaacactgacggctcctttgcctgtacttgtgcccctggctaccgacccggaccccgcggagcctcttgcctcggttcgtacccgggctgatcctggccccggaaagggtgggcttagggcaggaaaaggcgggacggggagaagagggcgaaaaggggaaaacgagtttttagccggggtattccagcaggatcagggggcagctggtgggagtctcgaggcagtgagggggggcggggcgtggagatgaaagggccgagtctgggtatttggaccgtgattgtaaagaagctgttctaaacccgtcggggggcggtgtttgcagggagggaagtagcgtgaggcaggttggggaaggcgtgagaggcctaggagagccgaggggcggtggaggggtgtggcctagaatgttaggcggagcgggaggtgggccgggccttcggacgccctgtcccgcagacgttgacgagtgcagcgaggaggacctttgccagagcggcatctgtaccaacaccgacggctccttcgagtgcatctgtcctccgggacaccgcgctggcccggacctcgcctcctgcctcggtgagaggccccgccccggcctgatccctcctcccttcgactccccgactcgccgattggcctcccacctctgtctttcctcctccgcttctcccctccccttacctctttcccccgcctcctctcctagcctccccaactctcctctaccccaatcttctcctgccctctcctctgcttccccggcctcccccttctgactctcctctcccctctttgtatcccccatcttgcctccctgcttcccacatccgaccacccgacctctctcctcagacgtggacgaatgtcgcgagcgaggcccagccctgtgcgggtcgcagcgctgtgagaactctcccggctcctaccgctgtgtccgggactgcgatcctgggtaccacgcgggccccgagggcacctgtgacggtgagcctgcccccacccgccttcgctagcgcttgcaacgcggtgctggaggctgctcccttggggactgaggaggggcgccctg

SEQ ID NO: 46 - DNA, 2475 bp, Homo Sapiens
gctacaaaaaggttaacagataagcattttccaagtaacaaagctttttctactacatgttacaggagccattgagtgctcttgcaaagaaaaccagcactacaaagtagtaaattataagtgatgcaaacactacctcctgtagaaactcacaggaagggaagccaggtagaggcatgctcccatgccagcaggtggggatacaaatcctccttctgctacctttccagaagaaagttagcaatagagatcaagagcgtaaaaaaaaaagaaaagaaaaaagaaaaaaaaaatcatttcgacccaataattccacttctaagaatgtatccttaggaaaaaaaattagacatttgttcaaggatttctgttgaattttccttataaggttattatattatcaaatagaaacaactgaaacagccaagttgggttacattatgggacatgctcatgatggcatcatatttaagtgacgtttttgaagcacggtagtgacttttggaaaaggctcaatacatcattttaatgagacgtgcaaactcatcattacgatatactaggagaaatgctttgacagacgaagtgggaacaactgggagagtgaatgatggagtgtcaggaacaggggcatatgagttgggtcttccaggttgtggaggtgtttccgggtggaagagaaggagggaccaagcggagagccctaagtcctgaagacaactgggaaggtaacacacctcttaagaagggcatgcagcagccatacctctcatccgccacggtcagcaaacccattgtgtttcctggagtgagttgggccatcaagatgggtggtgccctcctgctggggaagaggggctcggtgggaatccctgccccaaggcctggcagcaacgctcctacgctgccttgggccgcaggcctgctaagccctccgctctcgcttccctgcgcgcgaaataagtcccagggccaatgtggcctccccacccagtgcttccgggggcgccaaaaaacgacctgcccagaccctcagcgtcgacgctgcgcacaagcgcagtcaactgctggacccggccggtgtgaagtttcacacccaaaaggatgaagggcacccacctggcttaagagaacgactcccaggtaaagggccagacccaggtgaggagtcggcacagggccagaggtgccctgcacactcagagctctccctttgagctccttgccttgctcggttctcctgggccgcaggcgtctaccctgctctctggggttccgctgccttttccttgccaggtctttcccacagcaacgccttttctcttccttctccagcctctgagtcctcttcctcctctccccactgtcccacctctgagggacagaagtggggtggtttgagagcaggagactggagggaagaagcaagtccaggcctagctgcaagcactccccacccccgcccccgcccccgcccccgcccccgccaggctctaggacacttgacttctgttaggcctcacacggtttggtctgaagtgtttctctcttaatagctgtggatcggcgaggctcaatggctcacgcctgtaatctcaggactttgggaggccgaggtgggtggatcacctgaggtcaggagttcaagaacagcctgaccaacatggtgaaactctgtctctactaaaaacacagaaaattagccgggcgtggtggcgtgcacctgtaatctcagctactcgggaggctgaggcaggaaaatcgcttgcacccaggaggtggaggttgcagtgagccgagatcgcgccattacacttcagcctgggcaacaagagcaaaaaactccgtcaaaaaaaaaaaaaagaagaagaagttgtggagctgtctgattcctgatcctgtccgttcaggctggggccgccctggtctttcaaacccagcagtgagcttggacagacccagaggtgtttactccaggtaataggagctctagacaaaatcaggctcttttcctggcttagacctctccctgcttacaacacctctaggatgtgggatatctagaggtctgtgtagctggaggatgctgggaaatgtgaggagaagatgtttcctccttaaaattggaatctttctgatcacctgaattctcctgctagccacaaatcccactcactcttatcttatccttgtccttctgtcatcgtttacctgcctaatccctgaaggtagtgagtttcctgtcactggaagtgcacttctcggtacccttacttgtagaagttctcacagatgctgcttctcctctggctcagatcatgtctactgtgaaggaagcagcacaccggctgtccaaaagtgagatgagcctctatgcagtgctggatcttaagaagggcgcctcacctgaagacttcaaaaaatcctacaggttcagacctcagccctttattgatccttggaatttccccctta

SEQ ID NO: 47 - DNA, 3190 bp, Homo Sapiens
gggctggcgggcactgagctggggccatcacgcctttctagagcgcctgcggaggtggcgaaggcttggagagcatacgaggcggaatccggatcgagtgagttccttgagccgcttgcgtgggacgcagggagagggcgaataacgccctcaggcgctgaatgcaggggcaaggagccagcgagggtggctggagcaggccttgccagctgttaccaagtctctccacaggcttgggggcttggggcctcctggaaagatccctccgccgcgctgaccagtacggggctcgctcccgcactttgaaggctgccgcggtctttcgtcatttataatcaagcccaagatcaaggttgcaagctgaggtcggggtactgacaacgggaatgaagccataggggaagaggataactgggacgggctggacccatacttgatacccgggaaactcctagagcgtgtggtgctcctgccagcggcagttactggtggagctgaggccaccgctactgtcgtcgttggcgctttgcttctggaacctcccagcaagatggcactcactgtctgttcccttccgattagcacccccagccgcgctccctcctccccgggatacgtattagtcacatactgtggggagaagatgggctatgtaaatgtaagtcaacgcgctttcccagccacctttgcataatgcaacaggaacagcgacccgcgcgcacgaaccgggtagtgtgcgcgtgtgtgtgctcgcgtgtgtgagcgcgtgtgccagcgtgcgtctccgcgcgggcgtgcgtctgggtggatccttgcgtggcttgggaggcaaatcgggcgtttctccaagtcgtcttaacatgatttaggctctcaaatacgtgaaagcggtagacacaacagggatgcgaaggaaataaaaaacaattggggaagtggtgccaagtcactcaggctttgaactgaggacgagtagtgcggtcgcgcctggggcgcgtccggaaatcatcctcagcctgtggcggccactgccccacttaaactcttctgcggggagagttgagcggatccctggggggttggtcctgggctagttttaaactctccggttgcatctcgcgtggccccaccgacggcgcgtctcggcgtagctcttggcgcgggctcgttctccctcttctgttcagattcagcctcaccggacttgttacaacatgacagcaacttactggaggcaggaagagcagcacgaaataagatgagaaaaccaaaaacatctcctccttcctaaatagagacgtgcacctagctttttttacttgtttgtttgttttttacattaccctttaacctttggaaagagactgcgaagtggaaacgttgcctgtacagaaatcaggcttcttagctgtcaagactgtttcctaatctttaggctgaatctttctttgtccgctgcaatctatggggaaatttaacaacgctcttgccagaagcagccaggttgaaggaagaaagtgggggtgtttaaattaatcctattaaattttggattactcccccagttaaagtcatttaaggtggtccaggatgagggaactagtgatggggtgaggagtggggggcacatcaccaaggttgcctgcatttgaaataacgccattttggttgagaggtttgctgtattttaccctctaatctcacatttcgatcatttctcagtgtctaagtaatagatcctccctcttggcagtacaccattaagcaggtatggggaattctcctttcagggttcagatggtgacattatccctaaggactggtggtaggaacggcatgtgccgggtagatagagagaaggtcagggtggcatctgccgggttagccaggcgctcttcaactcttttcagagaggacagggttaaaagccaagtctgactttgcctcttggaaatcactgggtagcagccgcgcctcccaagcattctttaaaccagaaaagtaggagggactccgggagagagggagggaatgagggagggagagaaagagggctccaggagcggagcgcgccagagcgcgagggacggagggagaggaggagcgcgggagctgcggaggcgatcccgcgaattcattactgtaaacatatccgggggtgtcaggaggggtaggggtgggggccgcggcgcctacattagcccggccgcgtcggattgaggcagtagtgtggtctgagcagcctccagacccacgccgggcgggcgcagcacttggagcgagccctgcgcccgcccccgcgcagcgccgcacgcccggctccgagctgtccgcacacacgcgtcggaggagagcccgcctagctctcccgccgagtcccgggatcctccaaatccgaggagctccggcgccgcggggcagctttctgccgccttccccgctcgctgtacttcttttggggttcgttggcttggcgaagcggagagggggaggcggaggaggagagaaggcgggggtcgcggcggccgaagccaagagaaagtggcatgcccgaaccctggaggcggtggtggcggaggacgggggaagacgatgccgcagctccgtaggggacgtaggcgagagcaagcgaggcgagctgggcgccccggccccggcccgctgcggggaggcgcgcgccgctctgaggctccggcctccgcacccccgcgccccgacgctgcgggcgacagggcttggctccagcagccgccgccgtcgccgccgccgccacccggaggacccagcaaaagtttggatctgggggagggcgcggcgctgagcgggattaccaccagggctggaaggagacctcgagaacctttgcaggtaacgcgcgcccccaaccctcttcttccatgccccgccgctgcgctcccgcttcctcccagagcccttcctggccctcgcgggtctggcagaaagtaagagggaggcgaagttcaagatcccggggatgagcaccgagcgctggcagatcactagtcacgttagaggggcagctgtgctgagaggcaaattcccccaggagtgggtgagaaccctcagccccagctggtgcctcatcttgtagctctttggaaatttggaacgtgaatccaggggcttttagtattcttcagtccagagaaatggttcatggatttcactt

SEQ ID NO: 48 - DNA, 3016 bp, Homo Sapiens
tctccttcttctcctggcagaactgctcgatggccttgatcatgcccaggcccatctcgatgcagcagtaggcatggtcggcccggggctcgggacagcccgccacgcagtagtaacagtctcccagggtgctgattttctcacacttggtctcctcacacaggcggtcgaagcgaccgaacagatcgttcaggagacccaccagggcgtgggcagacttgttggcactcatcttggtgaagcccacgatatctgcaaataaaatactgacttcttcgatctgctgcatcttaaaagggcggaaggctataggagctttttggatggaagactttttcttcctgttcttggggctcgaggtggcatgcctcttgacagaattctcactctcctcatctccctgcttcattaagtcatcggctatgattcttggcatcacggaatgaatcatcctctctttgagggctttttccacttccaggtccttcccgtgcataatggattgccccaccttgaggaaggtgctcctggacctcacctgggacatgacgaacaggtggaccccgatggcgtggatgcagccgtggagcagccccctgctcagcagctcccagtgcagggccccggctccgggcgaggggaagcaggcttcatcccggaaatggtagccaaaggtctcgaaaaggacagagtaggccacccccagacacaaactcaggtacaaaggtaagtgcatgacggtatagagcaaaaagagcacttcgatgcacatggagaagctccccacttgagataagcaagtatctgtgggccgggctgtggccgtaaggttggagctgtcgccgcgtcctgagacaggcgtcaagacctggaactgcgcagccagggtcagggcgaacaccagcagggtgagagccagcgaggtccacgcgtaatgccgggcgtacagcttggtgaaggtaaacagaaagaagcccacacacaccaggaggaagcacagcgcgggggcgaccatgacgatcagtctggatctcatgtggaccgcaaaatagatgctccacagaaggcaggcgaagccgatgtagaagagcgcataccggaaccggcgctgggtctgcgggaagcagcgctccaggcaggcctcctccaggttcaccgagtcgaacttggggtcccaccagcggctggaggccctctcgaacagctggggcagcttcttctgcctgcgcagccggcctccgccgcccactcgccgggggacgcccccggagtccccagagctgctgcagctagaggagatgctgtatttgcagtgcttggggtggctgttggaggacagctgcttggggttgatcttgacgcgcacgctgttgctgtccccgctggagtcgcagctcacctcggtgctgtggtgatgcagcagctgctggtggggtggggaagccatgttgtcgagtcccggggcctgccccggccggggtcaccagtacctgccagcaaaacggggagagttagcggcgctcccacctaggcatgcacgcctagaggcccgggacctgctcctgtcctaaggggcggctccagcacgcgacctggacaggcaccatctgttcctgtggttcccggctcagcggtgctcccaccgcccccaccgcccccaccttcgaggcgcacgagaaccgctcgggacggacctagaacgcccgggggtccccgccgcgtggccgccgtggctccgggaccgctttgctcgctcgccttccgcgcctctcgccccgagggtggcctccgcgccgcgcggcttctcctcctcgcgcgctcgcctcctccagctgcggctccggagggaagttcagaccttgagcgctcccagccccgcgagccgcctgcgcacaaacaactccgctggcggcgcggagccctccatcctgcaggagccgcgctccgatgcgtcaaaggcggcgcgcggccggccccgggcccggaccccgacccggagcagcgagcttcggcgggcgcccccggctcgcgctccccggccgccccccgcgctccgggccggccctgcccgcggcggcgggcgctgggggtgggggcgccccgggctgcgagtgcgcggagcccgtcggcgcggcccgtctagtggggcctgcttccccccgagtgcgccgccgctcccgccgcggccgcagctgtcccgggaccgagcgcgtggaaccacggacgcgggcccctcgccgggcggcggtgcagacgctgccgcagagccgggctcccgcgacgccggccgggacgcccgcccgcccgcgcccacgccgggggccgcctccccgagctagagatgcggccgccgccgcgcccgccgccgtgtcccccgcggccgctgcctcatgtcggaagagctgccgccgccaccatctccggcccctgccccgcccgctgtcactgacagacgcgcgcccgcgccgcccctcgcccagccgcagcgcgcacgcgcggcccgcgctcgccgccaccgcctcctggccccggacacgcgcacgggccgcgcgccgccccgccttggtgcgcgcgctgggctggggctgcggggcggggcggggcggggcggggcgcgcgctcggctccgccccccgccccgggcggcgccgcttctaggcggcgggctgtggccgctgtccgcgctccgggcgctgtgggcccgccctccctcggcgtcccagaggccgcgcgccgcccggggtcccgaccctgcggagagacctgaaggcgcctgccgtggaagaagccgctggccgcaacgtttgggaaatcaaaatgttgccttcccactcggcacgcctttgggataaatcgaagtttccaaccgttggatttccctcccgggaggctccccttgctctgtaagcaatgaatgcgggccccggggcactcggcctgccctggacctgctcacggggcgaccttcacgggcctagcctccaaagctgggcccaccgacgaccacgttcccccg

SEQ ID NO: 49 - DNA, 2497 bp, Homo Sapiens
tgaagactgtgtggagtgggaggtctgtgcctatttttctcattcattggggaatgggctgagtggctgggggcaaagtgggactcaggggctctgcccagtccttactgcaggctaagccctcccttgcggccaagagccactgggccctccacctccctctggcttctacccgcagatctagatggtttcatggtgactcagaggaggatgcactcgggcgtcccttttgaggatggctgcagggaccatccagggactgagccgaggtgcagatacagccacggatttgggtgttgttagacacagaagggtgtgtagcaaagtgagccccacgcatgcgtagactcttccctcggcttctgctctccatggaaacacaactgatcacatcatgattgatcacggtagccctctagggctttctttcttttctttttttttttttccagaagtcataaagggatatagaatatactcaaagaccacctcatgcttttagtggagaggcaaaaaaggttcgctccggaatggggaagcggctgcgccctggacggagaggggcggggacttcgcgactgcaggcggagggagggcgggtgtcgctggcgcaggcggtgacagggagacaccgccgccactgagtattcctatgcaagtttcttcatcttcctgtgcatcagtgtttacactggggtaatgataaatgctgtgttgaaaaattatttgatggggccatggaaggaacggaaggaacggcgtcctggcccgctcggggcccgcgcacgccgccaccaagccgcgggggcgggtcggaggggagagttgcgtcagccaggccgctgtcagatgacgagcccggggcgtgacggggtggagcatccccaaaaaagtgcatgcctaggatcccgcccagtgtatccctgcgcgcggcgggccgggctgggcagctttataaacagccgtggtgtgagcctcgaagggaaccatcagcgcctcctgtccacggagctccaggtctacaatggcagcggccgccagccccgcgttccttctgtgcctcccgcttctgcacctgctgtctggctggtcccgggcaggatgggtcggtgagttcggggatgtagcctaagcagggcgggggccaaacctgggaggttgtggactgcagcgggtttcagaggaggggaggcttctggaaggaccggcgcgatctccctgaacgaacatcgcggtctccccgaacgtcgcggtccctccgaacgtcgcggtctccccgaacatcgcggtgcccccgaacatcgctgtctccccgaacatcgcgatctccccgaacatcgtgatctccccagacatgcccagctgaaggcactcagttcccctcggtggctcctttccgccgggtccgcttcctgcggctgctgcttgcccctcaggccaggaggtttctggaaggaccggtgctgtctccccgaacatcgtggtctccccgaacatcgcggcctctccgaacatcgccctctctccgagcaacgcgatctccccgaacatcgcggtctccccgaaaatcgcgatctccccgaacattgccatctcaccgaacatcgcgatctcgccgaacatgcccggctgaaggcactcagttcccctccgcggctcctttccgccgggtctgattcctgcggctgctgcttgccccgcaggccaggaggcttctggtagcaccggcgcgatgcccccgaacatcgcgttctaccccaacatcgcgatccctccgaacatcgtgatcccccccgaacatcgccgtccccccgagtaacgcggtctccccgaacatcgcggtccccccgaacatcgcggtacccccgaacatcgccgtctccccgtacattgcgatcccccgaaacattgcgatctccccgaacatcgcgatctcgccgaacatgcccggctgaaggcactcagttcccctccgcggctcctttcctccgggtccgcttcctgcggctgctgcttgccccataggccaggaggcttctgggtggaccagcgcgatctccccgaatatcgcggtctacccgaacatcgcggcctccccgaacatcgcggtctccccgaacatcgcgatcccccagaacatcgcggcctccccgaacatcgcggtctccccgaacatcgcgatcccccagaacatcgcggtctacccgaacatcgcggcctccccgaacatcgcggtctccccgaacatcgcgatcccccagaacatcgcggtctccccgaacatcgctgtctccccgaacgtgcctggctgaaggcactcagttcccctccggggctcctttccgccgagtccgcttcctgcagctgctgctagcaccgcagtccagggggagtgtcaaagaaggctgaaaaggaattgcaggagggtggagggaccaaaaggctacagagggcaaggtagggcggggatccctggtgcagacccgcagccccactg

SEQ ID NO: 50 - DNA, 3095 bp, Homo Sapiens
ggtcactacatccggcagcggggtggcccctagctcctgctgcccccccgccctttctccccgcccgcccccggagctcagccgatttctgaggctccaactctacccactccctccccgggccgccgccgccgcgccttcccccattcttactccctcgaggagagccacaggttgcaaatccaaccaacctcgcaatctatttttgcaaaatcactcacaaagatctccctttcgcgcccgcgcccgctcctcccgcgccgggtcccctcagccacggccacaaagtgcccttctctcctcctgagtcttgcacataaggaacgcgggctggggctctgttcgtctttctcctcgcccaaggtaaggacctcgggaatctgaagcctggcgtccactacgctcaggcccgcagttccctttttacagagcttgcaccatgggaaaaaataaaataaaatttaggaaagggaggcaacagccattgggagccaacacagagtcacgcagcgcccaaaatacaaacaccgcagcggccagaaatcccgccacctttctcgttctcccaggctgtcctgtcgaggttccctgagtccccccgcacactgaaaggcatcgcaggtgcagtgcgcacccctttcccacccaccccaagaagccctgtcccgccatcagtctctctcctcgggatgagcagggagagcgcgcggaggttcccgactccctcgactacaaccaagaaagaataattttcaaagtgttcaacatccccgcccccaagctccccaaaacacaggggcagggaacaccaaaacactcggctctcattaggaagatcacggctctgaaaggaaatagtagacacgatacttcatctcatctggatttatgaccaaaaaaacaaaaacaaaaacccaaagagttcgcttgcattttttccttccaaatctcggttcggctcgaaggcagggaatctaaaagaccgaggccgatggaagagagccagcggggcgagcgagcgggcagcctccctttttgcctcccggagttacccagaaggacaggggaagggaaggaagaagaggcgaggaaaaagaggagggagggaagcggaggccaggagcgacggagcaaggaaagcagtttgcaagcgagaaaagagggaaaaaacacagccgcacgaatccagagagatcacaagccgtacgcaagcagcagcagaaagagcgagagcgcgagcgcgcgtcctctccgcggtctggggccagacagcccccagactagcccgaatcaccccccaagcactgtctcgtcctctctgctccggccgccccctaattcccctccttcctctcctccacctcctttccaaaaaccaaaacaacacaagggagggtggcaaaagcctccccaaaccggccgattcactcaaagacaacaataataataataaatacataacaatctatatcctatggtgggagagacgtgggactaatcttcggcatttattttaacacctgacagctagaataaataaatatatacatttatatcaatagatacacatagaaaacttggagccaaagcatttggcaagagcggaaaaaaaaagaattaaaaggtaaaataatgatcatgagcagcggcggcggcagcggcaccagcggcaacagcggcggcggcggcagtagcagcagcagcggcggcagcaacagcaataatcacctggtgtccggcctttcctagaaacttcttgcatcaccacttctaagaaccccagttctaagaatcaacagagctcaattctcggaatttgagcttcggactttaccactgctacgtggcaggggaggacttggtgtcagctctccgagatttttactgcccctggccaaccaaaagccctcaaagccacaagattttttcactggccggcatatttcgaggtcctcataagcagagcgtctcggatttggaggttccggttcgaggctcgaggggcctgaaggtggctctccctccccgggcccaagacgatggtatggcctgctccgccaccatcacgtgggctcctcctctgtgacgtcggcgccttcgctgtagcaaagctcggcctctggaattctgagaactaatttgctattcggtgacataagagggggagtgcgctttgctttcccggggtctggggctaattccttctttcttacccataaactcagcagatcgagctaaatgcacaaaagggagcgagaggtttgaaccactgggaaaagtatgttatatatatagtagggttagagaggcgagtaagagaaaaataaaataaaataaacatcacagctctttccaactagaatattaggcaccacgagaaaaatatttgccaagcagttttcggtgggttcatttgctttatttttatttaggacaggggtttttgctgttgttctgggtttttttctttctggtgtggtggcttgggatttttggtttctgtattttgatggtttatggatttttgcttctgattttttgccttttgcaagtttgtggtgttacgtaaatcacaggatcggcatcggttggatttttttgtacgtgccttttctttccctatctaatccctcaagcgttttaaagatgtattatttcaatactaatactattgaaagaagcttaaatttttggccatatgtaacaatcccagcccccactttttttttttttttttcctttggtgcaattttctttttcccccttggacttttgctgaagtgtgtctctcctgcacttcagagaaatgttcaaaggatttgttttggtttggtttgtttctttccaggacagcaagtggtgggtttaatctgttattgttgactcttgggaaatttcttgttgcaagaaacgtgtgtgtgggggggagggtgggggtggcggggtggtatgtgtgtgttttctacaaaattctgtgagccaaatacctgtttgtgttttgttttctcttaaggtcttgagatttttgttttcgaggctcgtttcaaggtcgttgtaaaaaaatctcttcagtctgtgtttaagagatcagccgg

SEQ ID NO: 51 - DNA, 2478 bp, Homo Sapiens
tcatgagatccaatttggttgtctttcctgttgagtgagttactaaaggttccttgtggggtggaggggcgtgagggagtagatcacagacctcatgtcagcatcaatttcacatctacctgctgctgggtcctttcttgagctcaaaatgagctagaactcagggctctagccctggatcatgcaacctgttgttcttccctaagccatgtctgatttggtttaaaagtaatttcctctccatctgtatctttaacttcaaggaagtgggagagtcagagcaagctaagcaaactgcggccccagcaacctgcctcccgacccccaaagttcaagggaaggtatgctgagagagtctgccaattccgcttcgatataagaaaaatgataaaatcagctactgacattttcctgattgtacccaccccagacctgggaaagaacatttggcttgctataaatacaacaggagccacacatttttcaccttcatttcttcccctcaaagtaagatgattctgtaaacattctcatgaaggattcgcttacaaaaaaacaaaaaccagctccagctgctggtgtactattaagttgttgatcaggtatgaaacaagtgcaacaggtaacagttaacccaatagcctccctctgacccctacacactgagcaaaagctacacaggccaaatggaagcccagtgaccagctccagacttgaaataaaacctaaatcctgtctgtgagaagcctcatttgagctaagtttatcctttgctgggacatactgccacttgcaatgatcccagcccccagcaccaccttccacccaaacttcctctcacaaaattgacttaggcaatcgatccaaaggtaagctagctttcacagaaagacagacatttaaaaaaatgatccagataaacaaatcacacctccacagccaggaacctagagtcgaactaatttaatcagatgtaaaattaatgagaaccccgagacttccgacgtcccactccagaactcccatccaggtgcggtcgggagccacagcttctgaatattccttcggaacttttttctcacttgattcccaagcctgtcatggggttctttttcaatggcactgacctgcaattacccaacgagcagcgggacagccccgggcaggacgcatcctgggtgggtgacgtgatcccgcagtctcctccccgaccccatatcccatacaatgatcctcgcttacagaagtcaagggggaaagatgacgctttcaaagcccgaatctctttaccctggagccagaaccagcgtcgccgccgtcccctgcagctcagccggcaacgcgcgccgagcctcggggcgcagcttggagacgcgcttgctcgttctgggaaggggcacgggacgcacggttccccggccccagctgcacagctcagctcggggctctcacctatcctcgttcagagccacattcggctgcctcccctgaccacccgacacaaagagattcgccggtggaaagaatcgatttcaaaattcaagctcaccgctgctcaacaaggcgcgcacgtttctccccgtctggcttcacatgtcccaaacttccagtaacagaaatgaggaagcagcagccttccccggctgctggcggaggcagtgggtgtaacttgtgaagtttcgtgctatgatgaatctggtcacttgggtgtgttggagagggttggtcgctcctcccttcctcctcccaccatcacctccctcctctccgcctccctctccaatttaattcttccctctggcattcgccggctgtcactcagaatcccagcaccctccccaccacatccttgggggcaatgtatttcgaaaaggtcttaaccattttacggatgaacctggtcaccctgcacaaagcgtgagtgcttgtcaaataattttctacagcacgtggcaaaaaagcagcgcctcttaaaagatataaaaggccagcaatgttacataagcgccccccaccagcccttcaaggacagaaacgtgggtagttcattcagtggagacctaactcccaaacatctattgaaaaggagtgaagggcagaaaaacagaaaccaaactttcagttggctgccttttctttcatatgtactagaaagtatttccaatatacaacatatatttgaaaagaatataatgaacacccacgtgcccaccatgtagcataaaaaaattaaaattactcacatagtggaaactatctgtcaacctcttcctcgctgaaatacatccctctttccttccccctggaaagaaaactgccccaaatttgatttcccatgagcaatttttatatcagtttctaaaaatgtgaaagggaacatgctaacttaaagtttaccagaaagccatgcaatgaacatccctctgctgtgcttgaccttggtttccaaacagaagtttctttaaataaaactttaaa

SEQ ID NO: 52 - DNA, 2728 bp, Homo Sapiens
ttctcatttataaaactaagctataaaagaaaaaaagaaatagtggaatgagaggcaagagcgcgcaagcaagagcaggtgtgaacggttgcatgcgatggcattcgtcacagctgggatatcagagagagtcagatcctaggtcagatgcaccataggggtcccaggatagtccatcgcccctcccccaggactggccttggcatgtaaccccagcagctccaggcagctgtctttcggcggaacttctaggagtgggggcacccatcagcgctgacctgcggggctccagctgaggacagtccggccgtgggagtttataaagtaatggacaacaggcaatgctcttcctgcccaacagcagtggtcagagggacagatctatcctcacagagactgtcaggcactgtcgctacagacacggcccctcccccggcactcagtcctgcctgccttacacaggagtacaggaaaggaacttccaatgagtccatcttttatgttaggagagaggcaaggtgctgagtttcccatccggggagttcagctgcaccctctccccagcccccacctccctgacttcccctcctccctactacccctaaccagtggcccatcattcctttcccagtcagtcttggctgtgatgttaagcggctctgccggaccccatattttgtctggtctctaaaagggcactgacctgagggtacaaatgcagaggccccggggcagctaggcagccgcgagcaacccagcacccagctgcctagggtgctccaggcagcggcggcagcagctagaagctggtgtcattattacacaagccaggcaaatcctgctccagtacacagagcgcatctaaccagcaggaaggaaataagccaaaatcctcccgacaccacacacacacacacacacacacacacacacacacacacacacacgagtctgaggacaaggacaaacactttgcagaaagaaccctccccccaccccaccgacgtccaagtccctgtttcaggattcctcaccccccagtagcttctaaaatcctcgtgtttgaccacctctcccaacacatgggacagagagaatttggctaacttcaaatcctgtctcctgagcacttgcccacaaatagtagggggagtgatggggacgcccccctgttccctccaccaccctcacttctgccccccacgccactctcaggttgacagcgtcggggaaagacatcagaccatcaatccagcttttcctgccagctggggaaacaacactcggtcactaacagcacccaatcacctagagagcgagagtgagccgaggcaaacacgccgggttccagacaccgtcccagcccccgagacccgggtttgcaaagggctgcacacgttcgccggagggtcgctgccgcctccgagaaaggacttgaacctgagcccggtgaaggtaaaatgacacagagactcacctttaggttgtgtgtggggttgacgacacagacaagttgcccggcagcggagaaaacccgtttagccttgtagtgctgaaaccggagatgaatgagatctaatacagccccaaagcactgggtaaagaaaagcatcacaacttttggggggttgttggtccgggaaggcagcggaggaagctgtgagtccttgggccctggaaggagcgcagcctctgagacactccgctccagcccggcttagcgcgccttcatattcatcatcaaaataagacggttagaatcttgcagcagtgaggcggccaatcaaaaggacagaaatgttatccttgaggtgcagagacagccaataacaaatgccttccctaccgaaactccctgatgaattgagcctggcggagaatgtattattgaacattaccatagatcagcacattgcatttatcttgtgattacagccaaccatacctaatgctggggagataggctgacaaaattgattgcttaatgtgtctccatttattaattgacttaatttaacatgagagcctttcttaatgccctggcaagaacgtaaagcgtttaagccgccaaatagtacaacaccccgctccaaagtaggcagatggataacgcagatcatggctcgactcaccagagctgcttgggagaaaataaaatattactagactctgaatccagataaggacttggcagcagcaaaaatgtgtatctttcaatcttgcgttctgactttctgcaatttggattacagccccttgataaatcttactctccactctttatcaaagaaaagaatccctgacaaattcatttggagttgaggggtggagggaagcacatacatatatattactatacatatatatatattttctttttttcaaaatactgtgattactgaagtctgaaagtattaaaggataaaaatgcacagagtatgcttcaaaaaataatgaaatccctgatgcatgaatgcacacacacagaaaaacctacactgagaggaaagaggcttgtaaatcagcaaaataattacagatgcagagaacctttgcttgtcattcatttgcatattggtgggcagcaaattgctaattaaccactagattgctggagacattaaaatagagattaaggatgcacataccacatcatttacttgtttctgcaaatgctagcagcacatttctgtgctggcacaggcagagggcattccagtcctcagac

SEQ ID NO: 53 - DNA, 2728 bp, Homo Sapiens; identical to SEQ ID NO: 52

SEQ ID NO: 54 - DNA, 2728 bp, Homo Sapiens; identical to SEQ ID NO: 52

SEQ ID NO: 55 - DNA, 2437 bp, Homo Sapiens
agttctggatgacaaggacgtaattgcccagggcgttggccgagaggaataggaagagcgccccgtggagcagggcgggcgagaagagccgggcggccgcggggtcctcgcgcatgctgggcaggaagaggaagagctgcagcacgaaggtcaccagggagatgcacaagaagtaggcgggggccaccacgttgagcagccgcagggccagcatcctcgattacattcctgcggggcccggggtgagaagaggactgactgactacggcgtccagggggcgccctcgcccgctcctccgtgccgcgcgtctggggcactgcacgcgactccacgcccccaaccccctgtcccgcggatttcccctccccagttccctaaccccggatcaggcaggccagagacccgagcccgcagcggcctcgggtctaggccccacctgggggtgagtgttgcctggggttttgagcgagctcggcgccttggcgcggcagagtctggcacaggagggagggactcgtttgcagtctttaggagttgtgagggtggggggcaccgggggataggactcctcccctctgtggatgtggaaacaagcccaggtttgggatttctggttcagacctccctaggaggagaaagggaaggatttggggtcgggggcaggagaatcagcggcacttgacctgctggaaatcctgcttcacactcccctttctccgtccctgcgtccccacccacacacacatcttgggcagcactcagggacctcaccaggttacccaaggctctttggaggtatgtgtgcgtgagggaccacgatgtgtgtgtgtgtgtccttgtctgtgactctgtacgtgtaatctgtgtgcgcttgagtatctgtatttgtgtatgtatatatctgcgtgtacagacacgcagcctctgctatctagctttaaaaaaatcaattgaaacaatcgatacactcacactcgctctcgggcaccgggtgaggtgggggcgcaaccagaatacctgtgtcagcgggtcctggccagcacatctctccaacgctggctgcccgggctatttctttgcgaagagcgttttcatttgaggcgaaattaaaatccccccttcgcgcccgcctcccgccctcctgctgagagaaacccaaacaaccctcatggcgccgaaatcctttccatgccgacaagcccgccctgggcgcacgagtggatgcttggccagcctttcctgggatcgaccccgccgccgtgctcagccctcaccacgtccccatcccaccccacgcctcacagccggggttcctggccagcttcggaagccaccgagaaataggattccgtgcgcccgagagaacttttccaggggctaaggaatcggccagccggaggcgcgagaaaagttctgggaaggcggttgcacctaggatgggtggatgccacggggcctccgtccaggctgtcccgtccgcacgggtcgactggtcaccttggaatcccctttgcaggtcccagcgccccccgggaacccgcagcctccgcggagagcgtgggcctctccctaccgctggggcgcagcgcagtgcacgcctgagggtggtcgccgggggctgggcacgcccccagtcctgcgccgccgggggctgcggcggtgctgcccaccccagagagccctcggcctggggctccggcgaagcaagtgccttcccggcgccggtcgccaggggggcgcgggagcagccagatgcgccgcagcgctgggaaggcggcgaaggacaggggctaggggagtgaggggcgctcggcaggcagcctcagccctggccctgcgcgggagaagggacagcagagaccgcccgtggggccccggggtgtagggagctgtccgttcagccctggcgcccgcctcgcccgcggcagagggcggcacagccggagccttggaaagaccggcagcgccggcagccgcgggcttctcggccactgcctcccggacgcacgggaagccgccccccgcgccgccgccgccgcactgccgccgtcgcagaggggtgaggaaatcaactcaccgagctctggtcgccgacaagaggagccccggacgccggctctcgccctgcccgaggctgcaaagttgtggactcggcccggctggctcgcagcctgcgcttcgcttcgggaactgggcaagtagcggggatgtggggaggagggagcgggcagctgctggcttcccacttgggcgccagcgagtaagggccaggaagcggcggggatggcagctgggcaccccccagccccgccacccctccctccgctcctgggggcggtgctctggccgccagtctcagcatcgtggacttgccccctcctcccctctcgattccccttgagcgggctggggcgccctgcctggtttcagcgcccg

SEQ ID NO: 56 - DNA, 2382 bp, Homo Sapiens
ttaacctatggtcatctgtctgtcacagcgaacctttccctaggaaagaatctgccctctgcaaagaggatgtgtaatgctggaaagcccgcctttctccccatcagctggattctgagagttgggagagatgaccaatgaacaggctgagggtgtcacagccctgctactttgggatggggggtgcagtaggggagctacagtcttcccagaggccaggtcattctacccagctgcaccccatccccaacctttcagtgggcgacacctgcagggtgttgggactgggagaaacctcagataccttaaattccaaaccccattttccagatgaagatactgaggcccagagtgggtcagtgagttgcccaaggtcataggacaggtcagaatggaagctttccgactctccccggggcgctgggttcacagctccaccttgccaccccctgccccggaagtgagcactgaagtcacttaagagaggccagtgaccaaaggcagcgattcccaggtgcagaggctggggcagacgtgcccatgagcttgttcccccgcgcaccctcccccacctcgtccccattcctgtcttggttaccatgtgcctccatcatcctgagattcagagaggtgcagcggcttgtcgaaggtcacacagcacactgagtagggccctcgtttccactgcccagctgccccctcccattgcccacccgggcctctgcaagcttgccaggatccccgggagcctgcttcctccaatgcacagagccgtggcgcgtgtcaaagtgtgggaaagttcctgggagagggaaggggtagaaaatacagccgctcatctcaaccttggacggctgcggcaaggcaggggcgctcagaaaggcagccagtcctgcgcaccgccagtgcctccggcacaccccactctgcgccaggggctccccagggtcgcgcgagcatgttcttccagctcctcctcagcgaagcaggcgcggcggggtcccacgcgcccagcacccacttctctccgcacgcccacttcatgcacctccccgcgcccttcccacggcttctctgcggcgagtcgcctttgcttccccgcaggtccccggtcccagcgctaaggcaccgcggcttctctcgccttctctccgcgttgaacccgggctctccgcggggagaaataggttgggggcgaggggttcccgagataattcaggacacctccccggggtctagccaggtaattccgacgcccatggatttccggattacagttcccaccgcgggctcagtcctactcttagtttatcccgcggtgagcgccaagccccaaaagtcggagtgtcaccgtttggtgaccccgcgtccgcccgcgcctcaggccctggaggtggccactgtcggtccaggcacggcttcgctcgggactactggctgccctcgtggggtgccccgcctggggttccctcttaccctgggacgttccaggcgcgttcagcctgagctggtggagagggcgggggcgggggcggctggggtcccgaagtccaggtccctcttcccacttccccgccggccctgccgctgcggccctcgctcccgcgctcgctcgctctcgagtctctccctctctctcttctcttcctctctctctctctgcagtagtaacaacctgatcccgcttcccccacccgcctcttgagatgctcctcacatccgcctgcacacagcgcgtgcggcccctccgaaggcgatccccgcaaaccgcgacgcaggtcctccgccccaggcaatccccgctgcgggagaggccgcctcctggcgcccacgccccccttctgcagtccgtactgccggccgagggggaaatgggcgacaggggaaggggaggtgtgtgcgggacggactaggctggggcagaggggtttaaactggcgcggtcctacagaagtttgaggagggcggggccggctccgagcccccggagccctacgggactcccccgattctactgaggagtccccgccagctccgtgcactcctgcaacactccccaccccacccgccagctccgagtttacagcctctcgggtccggggattggctgggggaggggacgggggggaggggaccccctggctgtagggaacggcgtgcgggcgggggtgggagggaaacgatttgcttcaggagatagggatgaaggttttcctgagtcaagggagggagaagagaggtggaacaaaaggcagatgctggaggggaaggggagctggggagctcgccccgagggctccggcagcccgcggtcccctgcctcagtctgtcccagagggtgaggtcaaggctggtgccagggctcttcaccggccacctgga

SEQ ID NO: 57 - DNA, 17220 bp, Homo Sapiens
ttcactgcacaccatccatcctttaggctgctagcgtggccctcagtttccttcaagccaaagacacattatttccctgtgaataagtgtgtgaatgtggttgtgtggcccactcttctgtacccaagtcggtctcactcactcggcaggaaagtcttcgtcaggcattgaggagtgtttgtcattcagcctgtgtatctaagcatggatgtatgcatatgaatgctttttgtgtttccaagtgaccctcttcacacctttaaatgggctattgtctctggaacgcacttacagaaattctgccccagtttccagctcaacaaagtctgggatttttctctcagaatatcgctatacatctctgtatttgcatacccatgtttacattccccttggccagttctttatctcttatgtatctcttgttccatttgggcaacggagcccaagtgtcttgatttgtctcagcacatgtcattcaagcgcacatcttaatctgagcattcgtactacttccattctttttgctttgcctataatgtggctctttcccaggccagaccaatatgggtttgcagtttaaatgtaaacagaggatcccttaagatcacaaactcttaaagaaaggaagaggagggaggaggagactggaatgttagtaatgagttatttatgtatagggtaacccatccgcccatttcaagctgaagaaagaactagataaatgtctgcagaggtgtattaaaattttagaccaatttaatattagccatatatatacacacacaaacgatggatctcacaacacatcagtgtccagctcctctttggaggctgtctccttgcacatatctaactcctcacaagttcctggttaaaagtatgtctatttatatagagacaactcaaagaccgctttgctctcttcagtgcatacctgtacatgctggcggggcatttcaggctcaggtccttggtctgcagcagtcatagtcagaggccccacccgactacagctatgtgcagaccttcccgtccttgaacacccgcatgaattctctttgggaacattgagtctacgtctgtcttccaaactcagtttttaaagtgagggtgttcattgtgtgtgttcacagctccccgactgagaaatacctggtcaaactagatcatctagcagctgcgtttggtttgtggaagaatcgagcccgatgcaccaagatgtgaccgtgcacacataagagaaaggaaaaccctaggcccagactcacagctcctccccactgcgagctactctgcctccaggaatttccactaggctctttgcccccctttccctattacactaccccaccacggcctttaaagggttaagagaaacccccacggccttccctccacccagctcgctgggcccggaggctagctcgctcactcgcagctcacagagtctgctgccatctccgcgcctcccccccctccagtccttcagccgggagggagcctgcatgcctgtctagaccgatctatcaccggcacaccaacaacacccgcgagagcgcggagaccctgcccaggtcccccggcccgcacggttcacggcggacagaacccggggagcgtgacggtgcctgcggggtgggggtagggggcccacaggcactggccgctccgagcgcaccacgggtcctctccagctccggccccccgcgctcccaccagcccggctgccggggcacagtcacagctccgcgcgctgggcagtcctatttttatcttgtctaatcctaaactgggcggggagcacaggcgtcgtgcttagagaacaagagataggcgcgggaggcggggaggagcagccaggcagcgacgcgagcgggagcgagttaaagacacagtggaggcgaccgcgggcaggaagaaagagcgggctgcgcgggcctcgaggcgccgcacgcaacgcgccgccccgcgaagttacactcgcttccccgccgtccctcgctaccggcccctccccacttcccagcggcgctccccgcagcctggacagcgaggccccggcctgtgtgggaggcggaggccaggacggccctgcaaagggctggagagaatcgctaatgagctgtgcagcccattgatccggagaacacttcctaattaactctcagtcacctactggtgacagcgcctcaaaggacagcgctggggccagccgagccccagccgcgacttgccggccgggcgcctgctgcccaaaacccgcgcgctcccctaaacaccccaaggcaattggtgtgcgtggcggtgtatacccgcacactgaaggccagcctcggattaaacctggatggcatattaatcatcgccttccccccccactccgctctacgcgctgaaaccctgcccaaaataaacacgaaaaccaacactgcaaaacccacaccagataacaggtcgagagaggagtgggcagggtcaaggaacgagcgtattccctaagtgtccacgtacaggaatctttgaggctgacaattaaaatgccttccacgcaagcaattctgttggcaaaaccgaacccaacacttcgtaaggattgatttcggcccgcggtgtccgtttccagtgccacaggaagtgtcagatggccagaaatacccaagtctgtctgcactcaccacccaccaccttctggggtgggccatttcctcctagtctttactcccaggccattttaaggatctttctccaaaagactacccctagaaccaaataccacactacccctcctctagcgtcttctcaaaacgaaaaaagggggggaaaacacagctaaaaccccgagctgtctagtctagacgcagcgaggctgtgcgaatacctatttgaagcgcgttggtttctttttaaggtttgtttctaaatacacataaccctcctccttccttcttcgctcttccattccccccacccccaccctccagacgccggcggcgcgcgccctggcgcgcgggcactcacagcctctagctggagatcgcggactttctggaaaagattcattaacagcaaattacgcctcgcccggccacggcctacacgctgccagactcgtccgtctccgggaccccgggaagggcccactcgagcgtgcgagcggcgggaagcccgccgggaccacgcgtgacttcggccgccctactccacacacggtgccccaaggctctctccgtaaacagcaggcgctcgtcaccgccgccgcgagcccccgagttggcggaggctctgcggcgcagccgcccgccggctccgagcgcgggccccgcggcgcctcgccctccccgccttggccgaggatcttgccccggtgcgcaagttcctcttcgcctacagcctccttgccacacgccctccgagtgggaccaacttcctccggccgcagactttcacacgcccatcagggctacccaccagactccccattgcccagcggagggcccaggtctcgcccgcccccgccctccctccacgacgctgcccccgcacaagcacattctacacccacccctgggggctcataacttaaaacctacgctgaacatcggggagggagaggagggggaaagcgggagggggatcgcagattataatcttaaaagaacatttacaaaacaaagcgtctgacctggctggcgggcgggccaagtcggaaccccttgctctgctcgatttcttagtagtttttttttttaatccacgtgattcgtgctttggggcaagccaagaaaaaacgggactcccctcccgagttgcgcggcagcggcggcaggtcgagctcggctcggcccgaggcactcgccacacaccctcgcgcacgcacacgccgacgttccacttggaggaacgaccggcccccggagaggcgagacgaggcggcggtggcggcggctgggggtttttacagttctttcccgagtcgaaaaagaaagcagacggcaacccgctgccctccccttcctgctcgcgagctaacgccgaacccagcttcccagcttccagcccacctcccccccctccgcccgactcgcggcgctcagcggcgaccgcgctcccgcgcacagacacacacaggctgcaaacttccactctgcgaactccctgctctcctcctggcccaccgggaggcgccaggcccccagccgcgccccctccctccctggtgcccacgcggggccgcttaggttggctgcattttaaataacatagctatgaaataaaaacgaaagcgagccaagcagccaaagggaagcgcgaggcaaaagcttcgcggggtacgctgcgggagggggccccgggagagggggccgactgcagccctcagcgcgcccgcccgcccacccgtccgcggtctcccgggggaaaggtgttccgggcactgacctgaaatccccggtgggggagtaggcagggagcctgcgatccggctctttgaagttttcccccaagcggactcgaggcggcgagaaggagcggggggcggttgggtgggtggagagagatatgaggggtggggggggttggcgacgttaacgagcggagaaggagccgggccggagaagcgcggcgagcagcaaagtttgcggtccccggctgcccgcagcccgctcgcggcgccgcgctcactcgactccctcgccgtctgctggcagccggctgccctcggggtcggccccgccgaggggtgggctctgggccgggtgggggcggggcggggcgggctcggggcctccgggcaggtggcgacagccccgtgcgatcctccgggctcccgcagctggactgggcttggccgagctcagcagctcccgcgctgccgccgccgcccgcgctcgggcaggagccccagcgccatgttgacggttcgccgcgagcgcccgctcgggctgggtgtgtgtgagtgtgtgtgagtgttggccaagtcgtccctgcgcggcgacagcgcggcttgggctctccgcccggcggctcgcgggctccccctccgccgccgccgcccgcctagctcccgctctcggtcgcggtctgggctcctgcgcgtctcccccgcagccgccgagctcggcccgcgttcagcgaggagcgcagctctgcctcaccttgccgctgggagcccaggctccgtctgccgccgcacgccgcgatcccaacgcgtcccccctccctggttccctcctcttcctcctccccctccctccgcccgtcctccctcccgcccgccctacctccctccctcccaacagccgcctcccctccccccgcaggcgcagcgctcgggcgacagccgcccgcccgccgccgcctccagctctcgcaagtttgagctccgccagtctccgctcaccctccgctgcggcgcctccgcggcggggtttcgggaggggtgattccccaggaaaggtttgcccgagtttccccggccgtcatcgatgcacggcccggcacgttttggcctctctggatccgaaccccggaccacttgggtggcgccccccctcctcgtcccccggcctcccctccccagctcgggccgagttggctgcgcacgcccgacccgggcgcacgtcctgggcgagccggagaccgacttgggcggcggcggcggcgagggctgccggcagagccagagccgaagggatgggggcggcgggggcggctctcccagccgcgcgccgagactcccctcgctacccagaaggccagtggaggaccgcaattaccataaagcgcctcgcactccgctcagccaaagctgtcaaaccccagcggcagcagccgctgccgccgcctcttgccaccagcgctgcgctctcccggcctcgtcccctccgagacccagcggagcgtggcctgtgtgctcccgtgctcacccccaccccagtttgccccttcctcccagaggagccctttcccatttcggtgttaaaagctacctgaaaacaccaccccaggcaacggtggccgttccgcctgaactccgcgcccgagttccccggacgtttcaattgtgtgggaattgtttggaggtgggggaaggggggagcagcccgtggaggcaccgggaggcgtgtggggggcggtcggcgagcggagatccgcctgtatttctcccggttctcgagcattttcacggtctgtacctctgatggttggaggggctgcccaggcccctcgccccggcgttgggagattatctcccgcgttttattttccttgacagggagcaacttttggcttacaccgttcgccccataaatttccactcggtaacgtcgtgctgatcggtgcttggcggcggcgtacagcctgcgcccgcagcagttcaattcaattgacacgtattgagcttctccagcgcacccggcgcggctctgggcgcggggggagggcgggggcaggcgggagggagggggaagcggagaagcgaggttccggcctccccggagcgcaaagcctcaagggcgagccgagaagccctagttggtgaagctggcgggaaggggtaggagtgggggagggggtattccggactaaccgcgcccagactgcgggcccggacttcgcggccaatggtgaccccattcggctgcccactagggtctttttatactgggaagggggtggggtgtctctttctgcctaaggacaagatggtgcaggctccatgaaacataaatctgaaatggaggtggcttgtaaatccacacggaaagtttttaaaatatcctggagtgtccccatgccaaaaataatcaaaagcatctcaagttgattactaagtcaaggtcaaggccaaaatcagctctagctagcagatattttcccttttaaaaattagactcactactgactgtgggactggtattaggtgcgattttattcattctgttttagttctcagcacatagttataaaaacagcccttctcaaagcagaagtgaaacatctctaccgtttgaaacccgaaacttcggcagaattaaatcttcatgctccagagctgcttataacaactgatgcaaaagacaggcgagcaagtgcccccgcgagcagtgcccagccaggctgggccgcgaacgcttccaggaccagcgcctgcagaatggaatgcacgcttttttcttcctggtctttctgggggtggatatctctgcaagccaacccacacatttttttaatctccggtaacaagcagaaagacacctggactattatgctgtaaaactattttttataaagacattttaggaccagacattaaaagttattagattgaacgcatgcgagttacagacacagctggagaaaaggcctctggttgtgtgttgtggcaacatttctttttgaagcgactccttttattcaaaacaagtcaaaaataaccgggaaggctgaagctgggtatttgtggggaaactctgaacgtggttccaggcgaggaggccgctctgctgctgcaggctggacgggagaactggcctgggccagtgtggagccgtgccaggctcttccggctcggttaggccgaaccgcagaggccctggcccggcgcccagccaccttctatcccctcccctcgtctccccaactctgcccccaggcacaggcttttctcggagttcgaagtcgcatgtaaacgtccagaacttttagaaaatccaggaaccgagctcggggcctgcagcctctcagagtcttacggcctcccggggctgctgacaaagaggcctgtttgtctaactttaaaagtcctagaattcgggaggctgagccaggagaatcgcttgaacccgggaggcggaggttgcggtgagccgagatcgcgccgttgcactccagcctgggcaacaagagcgaaactccgtctcaaaaaaaaaaaaagaaaagaaaaagaaaaaaaaaagtcctagagttaaaatgaacaggggtggtgggggtgctgtaaatgcgaaggggccgaggggagggctgactgggggagaaatttgatgctggagacaaacaggccagtaaattcgcctttgacgtaatttgcaacatcctcccccaccttttctagggatcttgcctccacggtaggctggtaggattaaagggtttctcctccatctcctagggatacatttttcaactccgtgggatttcaaaaatatcttattaagggagtcctaagaggcatgagtggtgggggggattcgtgactcactgggaattaaaatgtgggattttcccgaggcgctataaggcagagggggggaggggagattacacctattggcccggttagttccaattgttctggggaaaacaagcagaaagctgtcgaagggcaatcccatcttgtgtcctcacttaagaaggggctcagggagctggggatgccgcggggcctgcaatgggtgccggcggtttggcccttctcctgccccctcctctcctgccctcccacaagcccttcgggagctgacccgggggtcaggctgctatacccagcactcagcaaggggaggatttcaatgaaaacagaggaggaggagagagtgagcaaaggagtgcatgggaggggaggccgtgcagcccacggagaaataaagaaataggtgccgaaatgagaggtgctgcggatggagcagcgggggctgcccctccgccaccaatctcccttcccatggaagtgtctcctgattataacaaaccactcgacctcaggctaaccaggccctgcaactgggcaatcgagctggcccttctaggagcaggccttgagcctggctgcccttctcaaggcaggttgactctgcaagacccgctagggcctctcccacacacctccagctccaccctggcctaggggaaaggccaggcatcctgtgtttggggggaccctggccttctaaccttgtgtgcaagatttatttataacgtatactaggatccacatcataaagcttataacgtatgtgtaggcttccgatggtcctcctcggaggctgttctcagggcgatgacacttggtactggaacaggtgggactcggatgagtacagataatgtatttttacataatgtgaggtagcctttctttaaaaacacacccacacttatagtcttctggtcactttgtacaagaactctgggcttatccaatggcactttaaaaaacatccgctgccccatcctccaagcacaaggcacagctggcttcccctctgaaactcaaacgaggtaacaaacaggaggcgcatcctcctcccaggatttcactcatctggaaacatctaaaggtagctgcctcccagggcagaagactgctggacttaagggtcgccaggctgaacatgactgttctttcttcttcctagcctttggagggttattgggtgtttggggaaggaaggccctaagggcagcctctccgtggttcctagcaaccatcttggaatttctggtctgggctcgatttgggtcaggccctgagctccccgaacacaggcacgtgtgggtgaactggcatctacactacgggggcccgcagggtggttgggtgtcgaccaaatgggcataatacaggaggcttctgggaggctggccgcctcttgcgctcggcaagggcttaagagccctcgacgccgccgcgctgggccgggtgctcctgcagataaacccggacgccacgtcccgcctcggctgcttatttagcaaggcgccttctgcgcatattttacccggctgggggcagtgagtgggaaccgccgggagagggggcggggaaccaccaactactcgccttcggacccagtgtgccggcctccggccccagccattttgtatccagcttccctcctccactcccaccgggtccctgcgaagacgcaccaccccgaaccccttcgcggtaccactcccgaactggaggggtagagaaggctctgccagcccctcgcctgcagcaggaaggtgggtacggaccagcagaagggaaagcggtgctgatctgtctctaaatacctctgccctcccgcccccaacaaagtcggtcacagaggtgagtggcgcgggatggttgcctcgagaaggtcgcagccaggagcaaagctttggggctcacaacggactgggcattccaaacggtgtaatcttcggcacatttcacccgctcccattccaccttccgaaccactctgctctcggtgctcatcctcctctccatacctgcgttcccagcgcgttagcagccgcgcagcccccggccctgagtgcggggggtggggtgggggggctcagggtggtttgtgtggtgcggcctgacagaaccttctgtgtgcggcggagggaggaggctaatgcataatgcacagcgcctggaagcccggccattagcggcctgtcggtgacacagacaaacgactgagagggaggagatccagctcgctctggagtttaaatagaccagcgtggaggggaaacgccatgatttaaaagtgtgtgtttgcagacactcgcatatattttaatgatttccagcaggctatgtgtcctagccttgcatccccccctccccaaaaggaggatgtgtctagaggagggaggatgaaggcagagtgagaggcctcaacccagacccaccagcagcttttgagagatgaaggaggggagaagttcagaaagcgaggcctggggaagccacacgacccaaggccaagcccagattttgttcttaaaataataatttaaaaaaagagccacccagccttccaccctggactacaccctgtgttgtaccagaaaggcctgggggaaagaataaattctgccacccttgcttcccccgggagcccacatttttgaatcttccttttccactgacactccagagacctccttcctcccggtttaacacactagtgttttttagcaattaaggcgagaagggggtggggataaagataagccaatttttttttccgccatgcaagtgtgagagataagataacgctaagctggggcaaagcggctgcttacaacctccccttagcgattttgatcggtcacttcttatctcgcaaaaatgctcttttcgaaaactggatcaaaaaagaaaaagagaaaaagaaaagaaagaaagattttcatttggaagtgacatttaaaacccacctcccctccactgacaacccaccccccattggcggggctccccaggaaaagtcgcacctcgactgcaggatttcaggctttctcgcggggggcaggattactagtgcaattaggctgaataaaaccagggatgcgtgatgaggatttatcctgtatccaacccaagctcgcggctgggttttccttctcttagttactggtcgatgtttgtgtttcgccatcgcactcagtgccttcaaactaaacaggtagttatacttgggagggtcatataactatgtcaacatgaagtggttgttaatgcgaaataagaagaaactcttctgatatttataggcccctataaagggagagaaaggaaatcacactccctagaacccgaaagctcccagccgaaccggaccctcggggagttttagaaatccttctttccgcacaggaatttcgcgaaggggtttccggaagactttgtcgaggaaggttttggtatcagactccacgacctcagagcgccctgcaaattccccccggcccagtggctagccccagaatgcaaacctcaaggcgggcgccccagaccaagctgacctagcctctgcccacccccagctcacaaccccgaggctcccaccccctgcccccgaccgggtcggcaccgtggcgtccggcacatgccaagtctaccgtctccaagccaggctgcaagatccaaaggttggggcctgccgcggacggattgtccctggggagctgaaaccgcccagcggggaaacccctcctctcgcccttccccgaaaagcttggccgcggtctaagctccgagcaagcgggtatccgctgacagccgggcctcacgtaaggcccacacgcgtcccattagtcagcccgagttcccctcgggcgagccgcctggcgcggccccaaggccgggctcaggcggggagagggtgcggggccgcagcgagctgcgggcggaggtgcgggctccgcggagcccggccaggctcggttccgcgttcctgggcccgcgggtaagctgagtcggcggggcaggccgctccctggctggcgccggggcgccaagctgcgcttcacgtgcccgccatatcagcagcagcggcggcggcggcgaggagggggtgctgggaggcgcgcggccgttcccgcggggtctccggaccccgcctccccgcccctccccgtgggggctgggccgagaccaccctgcggcccccatcccagcgcaagccgaaagcggcgctgccagacgcagagaggctcctggggcgccgttccgagagccgcgcggcggcagcagccaggggagggtgctcctcgcggccgccccgccgccgccgccgcagtcacggggaccggaagccctcgcgccgccccgagcggcctccgctggccccagggctgttccagacgagggctggccgcgcgtcacccctgatccctcctcgccccaggcgaccacccgggccctgcggtatcccggtgtaagccgagaggacccttcctgcggtccgatgagatgtccctgtccctctgctaccaccataagcacgcccccccgcaccgctcgcagctccgcagctgggaccggaggggcgcggagccgccactccggccgggcaggaacacctgctcccaggccctgcagctgggcgcgtgctgctgtgagaggctgcctactgttgtgtgcagagatcgcggaggagaaaatagggctccgaagctcagggccaggagcagccaagcctcggccacccccatctcccacccactgcaggcgacagagcgcgaagccagagggcctgctgggggcccgggtctcctttcgaaggtcgaagggccgccacccctgggatccggcttctggcctgaagaggtcgttcataaaacagatggggcaaaacctgttttgggagccttcccagtgtccgcccccgctctccaaaccagacacactcatctccccctcagccctactctagcctccggcgggggacgggagtaggtcatggcggcaccggtactccacccgcccccctccacgtagggacgtagggtcggctgcggggctcggactttgccactccacctagggaagggccaatggacgctccccgtctcctccgtgtccggaggagatccggcggcggagctgacctgcaaggcttgccctgcctcacccaccccccacctccgtcccaccctccccgactctcctggcccagggcccggcccgggaaggcgttgttttgccagcgggagccgagcgagtgcacagagaaaagcctccctactctaatgagagtgcacacagcgctgcagcgaggaggatgattacccggcgggcggggggcgcgggctcgggccgcgggcggcgtgtgcggcggccccgcgggcccggagtccccgcctgtctggctgctaatcgcacgctttctgctgttacggaggcaggcgggagccggcggccgagcccagcgccgacgactcggcgggtgacacggaaacatggcgcagcgcccctcccccgcccgcgctcccgcctcccgccctccccgcgctcccgcctcccgcctcgcacttcctcccgcccgcgcggcttttgcagttttaatgctctgctttcggcctggcaccattacgctagcagccgcttctccgcggccccgcgcgtctctttcccctttgttttcggggtctatagaaaacgtttgcttttgtcccgagctctcgttaaaccaaacttgtggtggcaacggaaggcggtgcaggcggggaggggtccggggattttggcagtagccggccagagcgtggtggaaacttctctcgctgggttctccgctccctcccactccccctccccaacacagagccgccggcctcccgacgcttctcccttcgcccccgagaggccccagtgctccaggaaggtctgggccacagagactgtgaccaggggtgaagaactcagagtgcgtgtctgtgagccccgaggttttggcactcgatgaccttgctccctgcagccccgacttacctctttccctttggtcattcggggctttgtatcagtcggtgaagaaggggagggaagagaaagtgtttctttcgtgcgtgtggtttttattttaaggatttgttggaatctgtcacccccaactgcacagccccctcccgtataggatctagggcgaaagcggggaaacgtcggatttagggggaaagggtcgggtcagaaacctagccctggaggctggatcgtactctcctggcgggctcagccacacttggtcggcacgcggggcggggcgacccagcagagtgggggacgcaagggccaggtccctcggtccaggagacgccaaacgttccaaccttggagcgagagagcaggaacccccgcccccacccaagcgcgcgcgctccctagctcgacgcgcaagccgtggctctccgcgccagagctgctcaggcggcaattttttaagcctgcaattaagcgaggcgtcgccgtgtcctctgctagtgtcggtcctgtcagtcgcacatggccttggtgctccggtccgaggccccgcgattagtcacaggctcgcttcgctccttccctaatccgcctctgcaggcagcctggggacgcggccgacttggcggcgctggcagggagccactgcccgcggggcgggcctcctgaccagtgccagccccgctgcgcccgagccggcgcgggccctggggtgcgggtttggcgcccctcccctctcacagccccctggctggggtggcggcgcccctcctcctcccgcccctctcccgggcctgcgagatctatttgtgtggtgtcatttgcataaaaataggacaagtgtttctgtgcgttcatacgcgggaggcgaaatccttattgatgtgtctgtgtggagccttcgattgtcggagcggtttgatttagggtgtttgtgttgccttctacaagaaaggagagaaagtccttctcaactccttcggcggcctgggcccccagaagcatgtccctctgcgcggccggaatggtccaccacttgggccccaagcgcgccggatccacagcgagcaggttgagggccaggcgggaggcccattatgactcataaaatcgggcggcctaatcgccagctgccaacccatttacatgtggagcttcccaatgctcccttcgcccgggcccggcttcctgagggtttgccccgacacagctagagccgccaagtgggagctaatctagtggcctctccttcccgtcggcagcgtggcttcccttccccggcgacccccgctctcttggcctactgcgctgctcgccagcaactcctcagcttggacaaatagctgggagggcgccggccgcgcggagccagtaaatcaatcattaactcccaagcgaggcctggaccaggggagggagcggcggccagagccgagtccgcgaggcgagcgcaaagcctccaccggggttaggagccacccacgcgccaacgaaccgggtgcgtgaaggcgggtcccgccatggcctcccgggcccctccagaagcctccgcccgccgggcctttcaagcccgcaccttgcctggccaggcaggtcgcgttacagcgctgcccctgggagagcttgaacattaacgagtcgcctcgggcctcagcggcctgctctccacaggagagcgtcccgcgcttgggcaagctcctcggatccggccgggctcctcctggctcaggcttgctaaaccaaactgatcgcaccctgtatcgaccaatctccctgcggcaccctcttccctcagcccacggtggagccggcacgcagggggttaaaagccccggttcgctctggctcctcggctgcgaggagaaaacgctgatcaaagtgcttaaggggaaggtaacacatgcacattcggtcccgggtcgaaggaggccgactggagacggctcccgagccacccgcctcgacccgcttcccacactcccgggaacgcggcggcggcggcggccctggcccgcacgattcgctcggcggagcgctgcgctgctgggctgggagggcggcggggaggaggagagacgagggggcgggaggcgaacccgggctgcgcgccaagaggcccggagccgcagattagtcaccgctcggctctgcgctcccgggtgcgcccgggaaccgggagggcaggcgtcggccccgctcagccgggctccccggtcctcggcgcgggtgcccccacccccacccccgcgcgctcctggcgcggctggctcgactctcggggacccgcgcagccgagatccacttgtcaggtcaagggcaggacagaaactctgcaagcggagtcttgcttgcgaacaggaaatttctccttgatgaggtgctgcccctcccccacgccgggcttcaaaacaaaactccagagcgggcggccaggtacccagcctcgctcgccatggccggcgacctccgctcctcggccccggccccgggcggcggagccaagccaacagagccggcggacggactcggcgccggccccgcggagggcgccaggctgccaccctccggggcccggacggggtcggcgggggtgcggagccccggagcccccgcgcctccccaggttctacagccaccgagcggttttgcggagctgcccgaggccgccgggtcagcggctccccggagggcgtggggggcggggaggccgcgcggcgccgccgactcggcgaatcccgctgcgggagcccgggagggctgcgagctcggcctggcaaagttcctgtggaaactccatgttttgaaactcctgcggcgtcgcagaaggagggggagaggggagcgcgggaagcgcgcgggggcggtctgcacccgcctctccccgccggggagtgggttccgcggccccccgggcctcatgggaaagctggagggcggggacggccgggtccccgggcccg

SEQ ID NO: 58 - DNA, 2264 bp, Homo Sapiens
gaccagcctggccaacatggtaaaaccccgtctctactaaaaatacaaaaattagctgggcatggtggtgtgcgcctgtaatcctagctactcgggaggctgaagcaggagaatcgcgtgaacccaggaggcgcaggttgcagtgggccagagatcgcgccattgttctccagcccgggcgactctcaggttaaatcgtgttcgatataaaagtctatatcgatatagacttttcgatataaaagtctatctccctttgacaggtctgatcgaccctccttcctataaagacaaaagttgtcttaacatctaagaggaaccatattgcggtgaaaggggtgctacgaatcctgggttttagctcttgcactacgtctcagtgtgacattggatcccaatttcctcaccaccaaagccaacgggctattataactcccttagaagtagctttaatccctaaagacaagactaaaaatattaacagtgcttgagcctctggaaccgaaccagcactggagttttgtttggtcgtcccctctcttccccctcaagattaacgatctggagggaattctggtgagttcgagttctcgtaacttgttagggactaaccagaagcccggcgagcagccagtaacacaatctctgggtattccttcagcctcatcagtacatctcttcctacctcgccttcctccgctgcagcttctttcaagtccacatctgcgtctccgtcagtttcctctgggattccatcggtgtcggtagcccccgggtccccgggcacagcggccgtctcatccgactcccctgtctctccacctttgtcggagggcgactcgtgggcatcgtccatcacggataggattggaggggagaggagatcgcggagatgcctgaggcagaagctcggaaacccgagctgcacaggccaggatcttacttcctgtcgtcgcgcagcgatgacatcacccctaccgctctcctgaggggtcattttgaggcgcgcgtagaggactagaggactcattttaactttggtttggcgacagtgggaagcgggaaaattggacgtaaagagctcagactatggatcctcctcgctaggaaaccagcacttgtgaaggagcgcagttttgtttactaaataactttttccttttcgcctgtctaaaaatgcaatgtcagttaatcccttcgttaacccctcagagtaaagttgggggactgggagaaaactcagttccgttgtatggcggtgtcgtggaatgaggctccccgggactggtaaactttcaggcaaggactcaaccttgtatatttcaactggcccgaaaccgcgggcctgtgtgtacatagaattgctagcatttcccctccattccgcaagcaccttaacaacaaaaagtcatatagctcgagcagaatttatccaattcatttattcatccacaactattgactgcctacttcgatttagaaacagtgctagtaccagggaacaaaacacacatagtttctacccaattaaatgatttttttcagttcgccagtactgaagattgaggtttgtttttacaagtctgacacttttctatcagtttggttaatctcattaaaactaagaggaaagcctaaagagaggaaggtgtctcctttgaacgtttcactttaatgaactagttcacgtactgggaggatgaagtggtgaggatatttctgttttaaaattttcttctcttccctcattgagatacgagggggagggcgttttattcacctgggtatgactaggtccccgcacctattacatatttaatttatgcgtgctgaaagaatggacttggaaatgtaggtgcgcgttacatttatctctttgtttctacgctgcctggacgaattaccgtatttcctgtcccaggagctcccaaaacctttggggaaggagcgcacttcgggaggcgcgtacaggtgggcctgtttgtccctttccacctgcataatgggggcccacaaggcgctgtccccatgccccgagaggcgtgtctcggcacagcaaagtccacctgcgctggtccgcggagccccgcccagctaggtgagctagggggcggggcgcgggggcgcggtgacgcgtgacgccggatcccggaagtgacgcgctcgtggggaaaaggcagggagggggtggtgtccccagccggtttggggggtgcgttgcccggagacggaaagtttgggagcccgagcaggctcggctgcag

SEQ ID NO: 59 - DNA, 2346 bp, Homo Sapiens
gacctcatctcaaaaaataaaaaataaaataaaattaaaaagtcaataaaaataaaaaacggccaggcgtggtggctcacacctgtaatcccggcactctgggaggccgaggcgggcagatcacctgaggtcgggagttcaagaccagcctgaccaacatggagaaaccccatctctaccaaaaatacaaaattagccgggcatggtggtgcatgcctgtaatcccagctactcgggaggctgaggcaggagaatcgcttgaacctgggaggcagaggttgtggtgagctgagatggtgccattgcactccagcctgggcaacaagagaaaaaccccatctcaaaaataataactaaattaaaaaataaaaaataaaaaggcagacacctgaagacacacgggatgcacgttggggaggtcccgctgccaccccctgcccccagccccgcccacaatgtgcacttgggggcccagaggtggcacagccctgcctgcttgggcaggagggcctggtgctgacttggtggggcctggttcccctgagcatcccccacaagggcctgactgtgggtgaggggcgcagggagcagtcggccccaagctgggcactgccctgtgagcctgggggcagcccagggccccccagaccacactgcccaggccggggctggcctcgctggctgagtgggcctctgtctccatgggaccctgccctgcagctgatctccaaggccaaggaggccccagtggggtggggcctggccctggatgtggctgacgtgtgttggggctgcctggggcttaggcgctgtgtttcgtccccaggagctggaacagcagctcatgatggagaaaagaaactaccgcaagaccctgaagttctaccagaaactcttacagaaggaaaagaggaacaaaggtaaggcccctgtgggcacaggtccgagaccctggctgcaggcagcccggcccccacccactctgctccacccacaggttccgacgtcaagaccatgctgtccaagctgaaagggcagctagaagaaatgaaatccagggtgcaattcctcagcttggtcaagaagtatctgcaggcaagtgggctccgggccccgctctgccccgtgaggcagtagcttcagacgggcctcccactgttggatgctgtaaatctgtccgtgtgaagttataaaaggggccctgatttgagggtccaatgccaggaagccctggggcgaggggcagagtgaccaagcgcccgtgtcccgctccggcaggtcatgtacgcggaacgctggggcctggagccctgcaccctcccagtgatcgtgaacatcgcggccgcaccctgcgacacgctggacttcagccccctggacgagtcctcctcgctcatcttctacaacgtcaacaagcacccgggcggccggcagaaggcccgcatcctgcaggccggcacgccgctggggctcatggcctacctgtactccaggtgcgttgggagaaaagctcacccggaaaaggagacgtagcccggggtgctgagaagagggggggaacgtgccctcgccagtcagctaggctgggtttgcactttttagtttagagaaatgtttaatcggggtttaggccaatgtgcactaggtgccaccggcagctttgcagagccctggccagagtggcctccgccgcctgtgggcctgggcaccaggtctcagggtgcgcctggtggtccccggaggtgctgcggaaccgccctacataattaacacacggaatggcttccaaaaataacacgcacaggcagctcggcgatgtggcctggactccatccaactcaccgagtcagaacacccggggtaattagctccagggacgggtgaggctggggtgtttctgcagccccctccactcggtgtgcacactggctcaggagacccctgatccgtaaacgctggtgtgcgtacgtacgcctgcagcagggaggagccgccgggcccactcacctccaccagggccacagggccagacccccggccgccccaccagcccccttggcccttcacccactctggcctgcatgggcccctgggctgcaccctgttctcaggcactgggagctgcagcaggctctggacccactggtctgaccagctcccagagaggccaccctgccagtgactggggccaaccccatgttggcttatgggacccttatgacaccaccttggagccccaagggtcctctctgagcagaggccatggggcccagcaaaggacgccaaggaggacagcagggagccagggctctcagcagccagtggggacaggcaggcccccagaga

SEQ ID NO: 60 - DNA, 3106 bp, Homo Sapiens
ggcgggcgctgtcgagcacggggaggtgctgaaatagtcctggcgtgctgattcaagctttgattggcagagccacccggtgactgacagggggtctccatggcgcccgcgccgccaatccgcccaccccaatagcggagccagctcgcctgccggcgtgcctgagccgagccgagcccgaaccccaagccgcggagccagcacctcctccagtcggggtcgtccgctcccggccgttgagccaccgccgccacccggtagtgtgtcccgctgccccaatccgcctcatcaacaagcgcctggcacactcagccaggcccgcgggcatctgctgcgtgtcccgctccgggctcagtgccctcgccgccgccggcactgcctcgatgttccagctgcccatcttgaatttcagcccccagcaagtggccggggtatgtgagaccctggaagagagcggcgatgtggagcgcctgggtcgcttcctctggtcgctgcccgtggcccctgcggcctgcgaggccctcaacaagaatgagtcggtgctacgcgcacgagccatcgtggcctttcacggtggcaactaccgcgagctctatcatatcctggaaaaccacaagttcaccaaggagtcgcacgccaagctgcaggcgctgtggcttgaagcacactaccaggaggctgagaagctgcgtggaagacccctgggacctgtggacaagtaccgagtaaggaagaagttcccgctgccgcgcaccatttgggacggcgaacagaagacacactgcttcaaggagcgcacgcggcacctgctacgcgagtggtacctgcaggatccataccctaaccccagcaaaaaacgtgagctcgcccaggcaaccggactgacccctacgcaggtgggcaactggttcaaaaaccgccgacaaagggaccgagcggctgcagccaagaacaggtcggtacctagaggcctccgcgctttgagcgcaccggggaggaggcgggtggaggcacctctggcgcccttacccagtccctggcgactccaattcagcaggagttgggagcgcggtctgtcttgggttaagagccctgcgttctgggctcctggccgggagttcccttgccggctctgcttccccacccgctggctccccacgcctgcgggcagctgcagcagctggtcccggtcaccaaaccaaggcttcactgggacggagaggggaagagaaataaaaaattaaaatcctacaaacagttagggaccccaagacccaaagctaattcttgtcagcctgggcacaggctcctactattaatcgaagcctggcttattagcaatgtgtcggtttcatgttaattatcattttcaaagcccaggtatatccctccctaatgctttgaaaacagttttcaatggacttttgagaaatgggaagtcgagttttcctcttcccatgcgctgcctgccactcttgtctcaaaacagcaaactagtccgtgggccgaggcttttcgtttcccggagtgtggatctcgattagccaaacattttgcggaagagcccggcctcatcccccaggcccaaatgctccttacaatcctttttgcctttaggtcgggccgacccgatccaacgcgatcgcgggagcacttgctcaggcgtaagccccaggcagacgcaccgttagaaatggtatcccatgtccctgggaccgatctgtccttgtcacccacacttcgtttatttcctgacagtcctgtaaatctcccaaaagtgcacaacaaacagggaggacactgcaagcccagtatataaaagacctgggagctgcggcgctgagaaagggcgcgaatcatggtggggcacaacagtagggacccgcggaggggcggccgcggactcctgcccgacctctgtcgccttgccgagtaatcctcgccttaactgctggggtcttcggaagaacctctagccgccgggctggagggacgcaggaggtggtgggggcgggcgacgggcggctgtgttacgagctgtgacccgtgttccctttcttccccgtagactccagcagcaggtcctgtcacagggttccgggcgggcactacgggcggagggcgacggcacgccagaggtgctgggcgtcgccaccagcccggccgccagtctatccagcaaggcggccacttcagccatctccatcacgtccagcgacagcgagtgcgacatctgagttgcccatccaggatgctcagaagcagattccagtgtaaaaacgagaaaaacaaaatgaaagaggggaagaagatgagagacctgcaaatccagcgccacagaagccaggtgaccagggacccgcgggctcgggttgccgtttcccgccccaccccgcggccggcctggcttcactggcgccctttggccgcgaccacgggaaccagcggtgaggcctgacccagcaccacgttcttcttgctttgctttttcctaaggattttgctgcaaagtctcttcggaacccgaactgcaagctgagcgcctgcccagattctcccatgggtatttcacgtcgaaaggacgctgttacatatgtataactttcgctttaaagtttttttttaacaaaacatatatatgctgtttatttacttatttaagagaccgccatggtaggtttctctgtagcttggggaacttgctgtttctaaacatgcaggctggtggtgatgggttctgtgtggagaagccaaacaataaaacaacctagtgggcaaccttcttaattaagggagctgctctcagattccttttcttcttattattattaatatcattcccttcaccaggcatgcagggacccttgagcaaatggtctccggaaggtcttacctatatatcttttgccttctttggtgcttcctggtatatgttttaaacaacctatggtaggtctataaccacctcccacgtcaaattacacgtatgtgcatatatgtatgtacctatacaaacatatgtatgtacctatacaaacatatgtatgtatgcatacacgtgatatatttaaggctagaaattggcaacatgtgagcgtcctctcta

SEQ ID NO: 61 - DNA, 2508 bp, Homo Sapiens
ggagaggttggaaaaatgagctttgaaattgcagtctcataaaagcaaaactgagaaaagatacaacagtgatggagaaagccagacgggcattaaaaaacaaaacaggagtctctcctaggccgcgcctacacgggctcgccgcgctcgctcgtcaccaccgacaccccaccccctgccctccgcatgggaggggcaagaacgcgatccgttcgcagcttccaggcaggtgatgaggatagctagtcccgcggtcctccgctagctggcggcgggggtcggccaggtgcccggaccctccgagggccccaccgccgcgcgtcccggggatcgggaccgctacccgcgcctcacctgcgcgcccgggccccagggccctgctcccgggcggtggcgcgggcctggctcccgtcgcagccacgaccgcccccaccgcccccgccgtccccgcccgggaagtggcgagccggtccggcttgccccgcccgcctcccggcccgcactcacgctccacatcgtgcagcttggctcgctcctcctccagcttgcccttgaggctctcggcctcgctcttcagcgacgccagcgtctcgttctcgtgcagcccctcggttgccatcttcgcgcggggacgcagcggagagggaagcggagagcgggaatgcgctgagccgcggcgggcgccgctccagcagccgtccccggccccgagcaccgccccgcggccccgccctccgcgatgacgccagcagctgcgggcccggctgctgcgcctgagccccaagaccccgcacctgggcgcgcgctctggcgcagtgcctggtgcgatgtccgcgtcagcctctctcctccgggagaggcagggagtgtgacgcccattttaccagcgggcaaactgtggcttagggatgctgggtgatttgcccgaggacgcacacagagggaagggccaagccgggattccaactcgggactccccgcttctggggagaccggtgaggcccccgcgacatggccctcccatccccaagcctctcgtgcagatctccgctctgtgggacttgattgcgggctgcgggcccgtggctcctgcaggcagagagaggacgggagaggagacggctacgaggcttggccgcaggtagctacggtgctcccccaacaaggaaccggaaaccctcttcgtttgttgatctaaatatacaaaaataaaactagttgctgggttctcagacggagtctctgcggcattaggaggcccacccttattttctcttttcttcacgcaggaatcaggtccctggcctgggggcggcaaaaggagatggcggtgggtcaagtgggcgcgcaggctcagacctggggcttctgagcccacgcccaggcatctcggacctctcacttctgaggccacctcctgccctttagaatgaagggctggcacagttctgccaggatgcacgtttagcgacttctgtcagactgaagcatcccctctccgcaagcgcctgaagtgtgagaggcactgttctaagtgctttaatttgcacttgtttaatcctcacaggagtcaacttgaatgggcacacttattcccactttacagaagaggaaactggggcacagaaagactgagtaattgctcagggggcatgctccaagaaagagggagagacaggatttggacccagacaggctggctccctagtgctctggactttggtgtggatgatccaactcaagccttctcctttttccctcctatgtgatcttgcatgcgtttgtgcagagaatgagaaggcagatcaaagttacagatgctgcgagaacatcgccaagcagaatcttgggtgctgtccccacctctctgtacctgctccctcccagagaagccagcctccacttgctgtcccgggccttctctatctgagaaaagttgaaggtactcgatgttaatctgtacatagttgttttgcaggttagagtctgggatcctccgtttccttatctggaaaagcttcttcataggatctgcttcataggattgttatgagaattaagtaagatggtgtgggccgggtgcggtggttcacacctgtaatcccaacacttcgggaggccaaggtgggtgtatcacctgaggtcaggagttcgaaaccagcctggccaacatgatgaaaccctctctctactaaaaatacaaaaattagtcgggcgtggtggtacgtgcctgtaacctcagctactcaggaggctgaggcacgagaatcgcttgaaccctggaatcagaggttgcagtgagccgagatcgtgccactgcactccagcctgggcaacagagcaagactcaaaaaaaacaaaaacaaaaacaaaaacaaaacaaaaaaaggtaagatagtgtgggtgaagactttagcagacttctccgtacatagcagatgcttattcactgctagttctcttttccgttcccatccgtataataataggtttacttgtcgctgttcc

SEQ ID NO: 62 - DNA, 2535 bp, Homo Sapiens
acaatggcttcttggaacttcttggaacaaacaagacaaaccaacacattagagccggcagcgggggcacaccgtgttcttctagaaaaggatcaaggggagtggcttcagtaacggaacatgagggactccctcacatggacacaaagcatcaagggacaggccggctttgcttttcgcttcttcctagctgcctaattaggacttactcagttcacagtgttctaccttaccgggccctcttggagccagctggagatgataaaaaccacacaggtattggagtcagatagcttcacatgccatttccacctgagaaacttgggtgagtcacatctctccaggcctcagtttttgcatctgtagaaggaagagaagacaacctatctccaaagcgttgtgacaattcagtgagatgatgtttgtcaagcccaccacacagggcaagttggttccttcccgtcccccgcatttgcctctactgagggtgaaggcagcagagaagacatcaccagcagctgcccaccactgcctggctctggagagggagggaccacgcatcctcacctaaccacaccaggccgctatcgcctgcatgtatctcgtgtccaatcggggccctgaggcagcgtcccgccctccctggaccccctcagatatcccaggctggaatggtgaggggcaggtgggagcagccaggcccttccctgggcaagccgtggtgagccacccgcccattccgcagcgggaggcggccgggcctgggggccccactgctagggcccgactcagagggcagcccggagtcgctgggccgcaccaccacgaagacccgcctgtgcagaagcccgccgggccgctcggagtaggcctccttgtggctccccgacgggcgcgggcagaggcgggcgcggaaggcggcctggaagccgcggcggaagttctcgttgaagtagccgtagatgatggggttggcgctgctgttgaagaaggccagccagtgcgcgaaggggaaggcgtagacggtgaccaggtgcagctgcggcgcgctgagctgcccgtagtcgatgagcagcagcagcgcccagagcggcagccaggacagcgtgaagaacagcgccaccatgaccagcatgtgcaccacgcgcgctctgcgccgcgatgctcgcgggtccgcagcctcctcgcccccgggggccgggcccggggcctggcagagcttgcgcgcgatgcgggcgtacatgaccacgatgagcgccagcggcgccaggtagatgtgcgagaagagcacagtggtgtagaccctgcgcatgcccttctcgggccaggcctcccagcaggagtagagcgggtaggagcggttgcgggcgtccaccatgaagtggtgctcctcacgggtgacggtcagcgtgacggccgagggacacatgatgagcagcgccagggcccagatgacggcgatggtgacgagcgccttccgcagggtcagcttctcgcggaaagggtgcacgatgcagcggaacctgccgcggggagagagacaggcgggatctgggtgggtcctagggcccctgcgaggggacggtgggtgggatgcgggcacctgaccttcatcatcgcatctagggcggcgtcgaagaacagctcagacctgaattggctgagtagtcaaagaacaaaggcagctacaggatttatgagaagggaggaggaaaccgcagatcgtgtgggaacaatgaatcctgtgtgcacttttgcacttttctccttttttttttttttttcctgagacagggcctccttctgtcgcccagtctggagtgcagtggcgcgattacggctccctgcagtctccacctcccgggctcaagtgatcctctcctcccacctcagcctcctgagtagctggaaccacaggaatgcgctgccacctcgccggctaatttctttcaatttttggagagatgaggtctcactgtgttgcccaggctagtctcaaagtcttgggctcaagctatcctccggcctcggcctcccgaatttctgggattatagatatgagcctccttgcggggccatttgtgtacttttgggggtcaactgattagctggcagctagcagagcgatcagagtgcgcagtctgtcctcgacaaggacgattaggtgcgtcaaataacacagtttctgtttatggattctccagaaaacctcaggaggtcagatgtagagcctacatgtcaggctgtccctatgtcatcttggccatagtatcagtatctctacaatgcaaggacaagtctgcaccatttatttcctcatgaggacaactcagcatctgttattacaccctttattattttttaaaggtgaggcctttaagatagttactacactgttgatttacagacaaggaaactgggactcgagtgttaagcagttggctcaagttcacatagcaagttgcaaggaccagtcttgaacccagatttgtcttgcttcatatgccatataaaccagtagctgtaaaccctcca

SEQ ID NO: 63 - DNA, 2493 bp, Homo Sapiens
actggcatgactagagtagaaggagggcatcctaattcccagccttatccaccgctttgcaagaaccaggaaaatgaattcctgttggccataaaactagttgcaggtgatgtaacccatcctattcggcctcccatatttacagctatacaggaacaactctctgaaactcagtctcctcacccgtaaaatgggatggtaatacgtgcccctgggagccagcgagaattaaaagggataagatgcactggctcccaggggcaagcactagcagacaaggaatagggcagtcctcccttcacactccacagagaagaaatgtcctccaactctcccaggaggcagagcccagctctccttccaaacagccttggagttgcttggcctctccacttcttcaacgaagttgtgggcagaagacaaatgcagagttctcttgtacctgacaaggagagagaagcagaccctgtgtgagtctcttgctgttgacgttgatccacagggggtgcaggatgggactgaggcaggcccacctgcctggaaagcctgcctgtaccctgaccccatggggccctaacacacaccctcccagccacaggggctctgcagagctaagccagctgtcctatggaggtggggaccctcctcctgccctgccactctctctttctcctggagaggacaggcaggtgggcatggccacaggagaacttctcgaaggtgctaactggcccagagaaagaaaggtggcctggtagggagttgtctaccagagattgagagagcatgggagaagttgagagggaggaggaaagtgcacgccatcctgcgcgcagcctcgccttagggaaagcatgtgtgagaagtggtggtaggcggttgctagccttggaaacaaacaaacagccaaccaaaaggcttcggaaggaaggagtgtctaattaatcagccccgagggacaggtccgcactgcctgactgtgctcctcagcctggtttcaggccaccgagtccaagtttctgccacagttccagggccgaggctgtttccaaagagccctgtaattgttttccacctgtgtctcacccaaacaccaaggctggcgcaggtggacaccttcccacttttctccctccaggctgggccccagaaatcagtagaggagggaggaatcagtcagcgtggccatgcctgggaggagaggcccgtgtgggtctgtggggctaagaggcaaaggcgggtggcggatgtgggccagcgggagcctggaggggttgacaccgcctgctccaccgcaagcccctggaggaagagccccgctgtgcccgagagcgagcgcgggcaggtgtaactacccggggctggggctccgggggctccgcgcagcctccttccctcccagggacaccgcccagctgcgccccgcgccccgccgactgcgcgggccttgagacgctggtggctgcctcggggttggcctgctcctcgcgcacatgttcagggtcatccgcgctgcgcctctgcttcaggtgcttggctagagaaagggcggcaagacggggcagtgcgtgtgcgcgcgcgggcaagtgcatgtgagtgcacacttatgtgagcgcatgtgtgtctgcgcttgtgcgtgtccaggggaaccacagggagcaccctcattctaagcctccagaggactgcctgaagccgctagatagaaactcccctagaatgtaagctccgggggggagggagctttgtttgatggctgctgtattcccagtgcccattgaagtactggggacacattagatgcttaataaacagctgttgagttaatcaacggactctaggaatggaggcagaccggcccttctggaactggagaaaggacaaggccacatttcaccgtctcctctgttcttggtaccagccctggcgtccccggcaacgccaatccttctcacatccagcttgtgccaagttttcctccctgctcgtgtttacaccttctcccctttgtctctgtttcctgctggcccctgtgtgtaagcaccccagcagtcagagtgagaggaagacgaaagaagcagaattctggaaatagagagctaccagggtggcctcttccttctggaaggacacggaaagatggggtgagactggcgctcttcttcagctcctccctttgggaattgggactttgagcttcagtttcctcactttgaaatagcagctattccacctgcctcgcaggattgttgcaagaagtcaggcaggaggctgaaaagttctggagcacatgataggtgctacagaaacgttcgtttcgtctcctgactagcatccaacagtctgggagtgccccaggtgtggctgagggtggttatggtttgataaccaccaccagaacacccctccttttttcacaaaatgccttgaggagaatttaatggctgtcgaaaattaaggcaagcttcatttctaaaacattcaggagtcaat

SEQ ID NO: 64 - DNA, 2346 bp, Homo Sapiens; identical to SEQ ID NO: 59

SEQ ID NO: 65 - DNA, 2494 bp, Homo Sapiens
tttctatgaagttacaaagctgcaatcccgttctcatgtgcagcaccacaggttttgctttcaaatatctgcaggtgcatcctcctgcactcgttaaactaagggttttccttttctgtgctagacccgcttttacgaccacgctctccacctgattcacagaaagggttctacgaccgtcaggtcaccgccgcctttgtactttattggggagtcgaaggcctcagcgctgctcgcgatttccctaaggtggtcgggaaggtcccaaccacgttcttctgtaaaccagataaggaaggcctggggattccggccgcggaaaggcacagaggaggtgaacgctccggatgcccaagtgacgcacttgtaggcggattcggaaactcgtgctcttgagccggaggcggagcccccagactcagaccgaccccccagaaccgggcggccttgcccgaggcatgaaggctttctaggcccgcttctaaaagctgtgtacaatggagactcctggaataggcacatatctctactgtaatcagaacgagatgtaacatctaagacgcagggcagggctctggcaaagacacgctgggggaacgtgaaagaaagggccaaaactacgcagctggtcctcagagaccaaagactacgacccccagcattcaatgcagtgaacccctaggacgttgcatgccgggagctgtagtttctcaccaccgccacccccccgcccccccgccatctgaaagggttctaggggatttgcaacctctctcgtgtgtttcttctttccgagaagcgccgccacacgagaaagctggccgcgaaagtcgtgctggaatcacttccaacgaaaccccaggcatagatgggaaagggtgaagaacacgttgccatggctaccgtttccccggtcacggaataaacgctctctaggatccggaagtagttccgccgcgacctctctaaaaggatggatgtgttctctgcttacattcattggacgttttcccttagaggccaaggccgcccaggcaaaggggcggtcccacgtgtgaggggcccgcggagccatttgattggagaaaagctgcaaaccctgaccaatcggaaggagccacgcttcgggcatcggtcaccgcacctggacagctccgattggtggacttccgcccccctcacgaatcctcattgggtgccgtgggtgcgtggtgcggcgcgattggtgggttcatgtttcccgtcccccgcccgcgagaagtgggggtgaaaagcggcccgacctgcttggggtgtagtgggcggaccgcgcggctggaggtgtgaggatccgaacccaggggtggaggcggctcctgcgatcgaaggggacttgagactcaccggccgcacgccatgagggccctgtgggtgctgggcctctgctgcgtcctgctgaccttcggtgagtgattctggaggagcagacgtcccccctccacacacgcggccgcttctcgaaggtcctgggggcgttgaacgtgggaggggggatcccggggcctgcggtgggccaagggacgtcaccattcctcgaaagagggcaagggaattacgtttattctcttcttcctctggaaataaaaaaagagagcaacatcatctaactgccctacagatctaatagtatctcgcccggaggtctcagcgacctcggggtggggcctctctgaggctctggctcccccgggagctgtgcgagcccctcccccctccccgcccggaggactttttcggccaccgcaaccttcggccatcccagctttcccgtcccctaattccccagactccgactcctcgcaagcccgtgtcccttcttagatgctggcctcgggagcgtgaggcctggggccagcggaatggcagtgtcagcgtgtttgattcagttttgctggagttcggttcttaacatttctcccccttctcatgcctctgggctcaatttcagttcccctcgccagaggttgcataaatcctatttgcattctgacctgtgctaacgaaggccgaagttttggcttgatcagttgggaggccttggctcggcctgcgcgcaacacgtgtgggtgtagaagaggcctggtatcagtctgcttaacgttatttataaatgatcggagacacactgtttagaagtggtgactgcctccgtatttcaggatctactggagacctcagcatctgaacttaaatagatgttctgtcttggctttacctttggtatttaaaccagggaatgcactctttcatccccacctcccttagttaccaactgaattttgcaacccctacccttccctatttgatcatcctccttggagaagtgtgatgttgaagagtttgcccgtgttaaatcttcagggtcggtcagagctgacgatgaagttgatgtggatggtacagtagaagaggatctgggtaaaagtagagaaggatcaaggacggatgatgaagt

SEQ ID NO: 66 - DNA, 2196 bp, Homo Sapiens
ttccctttttttttcccccttttaccagtcatactggcttactcagaaccctacaaatcaatcctgctcattcttaattttccaacattgttcctgagattgtttcaccagaaaagttctcccccttatccacttcgcctaacaatttctacccatcccaatcctcctgcatttattgcttccaggaatttggcacttaggacacccttgtccttacattgttcatgcatgtatatttcgtcttcaataaaacatttagttgctcaagggcaagggtcccatagagtctcaatatgctaacggcctggtgttgcttaataatttagattctgacgggtcctctccagggaggggagcaaagggcaaattatcttaggggctgggagtgcagaagccaaacctttgagactgtgaaaagaagacggcgccgagacgattcagtagcaggcattcaagcaagaaaaactcaaatattgttcccaataatgcctgactaatgccaaataccaagtaagggcccaggcagtcctgacagcctgcagtgccccaggataaaactaaccctgaggggtgctagcccacgataaccccctgccagggctctggacacgccctgtctcctcgaaggccaacgggctgcccctgcgcgccgaggccccgccccgcggcccgccgattggccccagccgccccggcgctaagactcaatttcacactacgcgcccaggccacgcccacctgtcatgcggccctggaaactgtgagtttggggattgttgtgtccactaaccggactcagaagggacttccctgctcggctggctttcggtttctctgctcacctccggataaatcacggggtctcccgcgccgctcatggcgcctcccgtccgtctcgagcgtccctttccttcccggcgctttcctgggttgcttctggcggccctggtgttgctgctgtcctccttctccggtaggaccccggggtggattcgcgcgtccgcggcgaggctagagctctgctcagtcagtcgggcaggaggcgcggggcgaagctcactgcacgtcgtgcctgcttgggatagagagcgaggccagggttctccgaggggtgccgtgctcagatcccgggggtatgtggcgggggatgcgggaaccacgcagaagcttgtttggtggcatcgtgtgcgcggccgacatttacgcaggatctggctgcgttcccaaaagaagcgtgaatcgtgttttcgggattgagcccagtcagcaaggggagggcttactgggcgccccaggtgagggcttgctctggagtgcacaggtgcgtgggattgttgctagagcccgtgctgtgcccgtggtgagagtttgccctgtgttcccttggtgccttggtgagtagggtgttcattagggcttggacagtacccgcggtaagggttgcagtgcgtctgctgtgccccatgggctgggctggcctgggctgggctgggcgagcaggggcctggccaggtgttgctgggagcgtgctgtgcgcaagtggcctgtgtgcggagttcactgtgggcaagacagctcactgtttgctttgagtggagcgagcgcggactctgcggctagggagggcatgttgagtgagagcaggctctcagtgcctggggttagagaggtggtaagggcgcaccatgcttttagtgccttctgtgaacagtgtccgtgttgcctgagatcgtattggtcttgaattttaagtggctgcttttttggggggtgggtgggccatcgagtcatcttcctgttcccaaccaatatagacagtatctgattccattgcctagtggctttttgacattgttttccttcttttcattagtttgagtcatatttgagagatgtgaagcaacctaaaaaacactggtagccaaacctagtgagaaattagtatcctaacaaaggaaggcagataatgttaatcttgttttcccctacagctcataaactgaagcttaaggcctatcccactgttttgtatttcattgaatggaatcaatatttttaaaaatgcatgctaggccaggcccagttgctcacacctgtgatcccagcactttgggaggcccaagttgggtgattgcttaagcccaggagttcaagatcagcctggacaacatgtcaaaaccccatgtctacaaaaaa

SEQ ID NO: 67 - DNA, 2355 bp, Homo Sapiens
gcagaaaacccgggtactagtagcaagatccgggagacatctaaccggaaagaaataaaaaaccattagtttcccgaagccattcttattctgaacgctgttcgttaagagaatcatttactaaagctctcttgtagtagcctttacaaaagctttatttcattcagtaagaaagcgccccgtcccaaatctaaataaaccttacatagatgaggctccggaaattatcagcttgattctttatgaagatagttagaggtggataaatcaatagactcgctgaaacacccaccttctgcaaacaggcctgagaattaactaatcagaagtggacaaaaagtagggatttcagaaagatgacctgacacatcccattgatcttccctggaatgcgacccccaactccttattaagagtccaaaatggttaccagccaggatgggtctgggtgaggaatcgaattacaacccacttcaatcctcgacctggtcgtttgctgttattaggagaaatggggcagagagggagggcaccgctcacggagcctcatttcgcatgctccgatcccctctcggcgtccctctactccgcccctaccctgaccgcccgcgagggagacgccggccgatggacccgcatctgccctcacctctcgccttccccgggcgatccctctacagtcccggacccccgagaaaggggaagggagacgtgtgcacacgggggcttccgggaccgcggtcctgcagttgccgctccggtccccagcgctggccggcgacccgaggcgcggctcgcacctacctgcagccccgcttcccggtggcggcaacacctagcgatgctcctgcagcttttgcgggccggcgccagccttatcgctctcgcatcgcttccaagatgccaatccgccgtcaccatccaggggcatagggaaccgaagtctggtgctgtgtgatcgtggagggcggcgtgtgagtgtggccctgagcgtgcgagtgtgcgcgcgcgtgtgtggatgtgtttcctcctccgatggcaaagacggttcaggaatctgacatccaagctggaatccccctgaagcgggtgaaggtgagcctgatccttctccccgcttctttattccacagtgtcaaagtaatcaaaagatttgtttactgaggaaaagccaaagtcccgcagcccttggcagcgcccgcggtcgcctcctgtcctcgccggatgcgcgcggtgcgctcagctccctggactgcaagaatcaaggcggtcttgctgcaattaccgctcttattccatctctgatttgtttgcttttaaggccgactaaagacttttcctctcgcctcacgtcgtctctccctctcacacacacacacactcacacatcctccgttccctctctcccgccctccctcttgttctctggggaaaggcaattggacagaatgattcaccttcaggaaagcagcctcggccacgcacttctcgagttccctggctctcgcaggtaccgggtctccaacgtggcggagttgctgggaagctcgggacaggaaggaggagaggctctgagctcagccgatgtcccccctccagacgcccgcgttcctccgtccaggtgcccctgttcccactgctcgcagataggtccccgctggtgccctcgcggagacttggcgccttccactcgaatccacttagcagcaactcctggccagcttcagcccctcaatcccgcctcgaagtgctgcgggcagagccccacgcagcccacccgctgcccttctaggcatcgtgggctggaaggaagggaaacccgccgatgtccccctggtagcagtgccctggcaccgtcaccaccgaggaggtgcgagttccaacatcgaacacaagcgagcaggtgtcgcctgtgtcactttgctaaaggcgggaggggagaaagaaaggagcggggggagggggccgaggaaacaaatccagatcaccggcggagaaagaagccgtttagcaagcaaagcctcctctccgcgtcccaccccagatgctatactgtcaaaagacactgatgctaatcttttagaaagtcgccataaagggcagagcccctgctccactctagaaccctattccacccagcctggctgtccagtgagtacagagtgacttggctcccccgtatagtgcagcgagaatgcaggagaataggtcctgacactccaggttgagttaagcagtaaaatggaatggcagggccgggcggcgttgcctcgcctctctctcccaacagccagttctgttagccccagcaactgccgttgagagcaaacaacggtcctgcagaaaaagaacgag

SEQ ID NO: 68 - DNA, 2192 bp, Homo Sapiens
ccatataatttttaaaaagaaagaaacccctaaattacagatgtgcctggaaccagaacccagaaagcatctgggtagggaaaatagtttctagtgttcaaggccaaagccagtagggcctccttggatgggaaagagatatgagactgcaagtaattcctggacattacctatttgttattgtgttttcatcccttccctcagtcacctacacgttttctttttccagctaaaatgaatctaatctttgttacagtacttcaccttgttaataaaacccaggactgaagaatgagaataaaagggttttatactcaccatttcttaatttctgattctagtctggacagaacaatcactcattctagaaaattggcatagggagcatttattagcagttgtaacatatcactgccaaagggagggattctgtaaggcggcactgggtgtctcatatgtatgggaaacccgaggccacgttcagtgccaaccacaagcattttcatctctggccaggcaagccttgatccctgaattttgagctctcaacctcttttaaaatgagaaagagatggtttcttccagagtctttcagcttctaacttacaggcaaacactaccgtatgctgtcccccagcagagattggttttaaccaaggcaaataagttaggatggactttgttgaccgtgatggctcagtgctacatctcatatatcctaccacctttcagaacatttaatagtgctgctcctggcagccctggggttgtagtccttgtagagaggaggaactggcattgaaagaaatagttgagtttcactacgccacgtggggcgctcccattgctaagagcaatctcccctccctgggaagaaaagcgtgggcggggccggggcagtccctcccctccgcgttgccttggagaccatgggcgtccagctgcagttgtcgctggaccggccctggctgccttgagaggtgctttctgcaggcggggacgcggccaggccggacgcaaggcctccctccaatctaccgggctcagggggacggccaggggctgctcagtctacttggcgggctagggagggggatggcagaggctggttgggtcttctcagcacacagtaggcgcctaattagcgtgacctgaatcaggttactctctccctccaattctcctccctgtgtcccatggagggtggattagggtcccggatgcgaattctgcgccgcattagagttccagtcccaaccgacaccttgagcgccgttaacttttccccgaagagcatggcagagtgaagcacaagcaataatcctgtattattcgcgttcccagagtcccttcggatttgcgccatgcgcggcggggagaaccggcctcctgctcgagttcagagctcatctgaggttagtttcatcgtttcgttgaaagttaaaaccctaagtcgacgttccccagccgcctaccccccagcagagagtccttccccggggagtcctgccctggggtgccgcctcgaggccagacgtcgtcccgcctggacctgaacctgagtttgggacgggcgatttcccaacctcaggaattggaattgagacaccaaagcctagacgcgtttcctggacgacggcttcccggcaggggcatccagccagcggccaagatgtcgtcagtggggaaggtgacccaggttccgaatgggaaagcctaccagcagatcttccaggctgaggtaggagccgccctctgtcccgcttttctccatcccccttcccttgctttcttccaaacttccctccctcccagggcttccctactggaaattgaataaaacaagggctttgaaattactttgattttaaaaataattcttgcttgttcttaaatcgtaccaatacaaaattagaatgtcagttcttgaaaattagaaaacttaaattaaaattttaaatgtaaattactcagaaatagcctggatggaaccactgggtgacctctgtttttcccatgcataaaaacatgactaatttttgtatttaaaaaataggtttcattctgtactagtgttttgaaatctgctttttcttcataacagtatctcacagacccttttctatgcccgtgggcgcccatgtatttcaccatactgagcagctccccacttgttgacctaggactcccat

SEQ ID NO: 69 - DNA, 2315 bp, Homo Sapiens
ctgtacctggcgtgaggtctcctggccacggacgttgttggcgtcacacctgtggcacctgaggtgaattgttcagatggaaacggcaccatcaggcaactggcaacagaagcctaaagccctgggtgcctcaggtcagaggaaggaaggaatgcaagggccccgctccccccaatgccaggagcgtgtgttcacagctttagacaggacaacccactgcaaatccaaagcagaaaacatggtccaactccatctctgtggcaccttcatagatggtgcccacctgccttggcagtgatgaccgacactgcgaacgctgtgctggcagtgtgtttaagggctttaactgaatcatctcgatggagctgaaatccagccccattttacagaagagaaaactgaggcttagagagatcaggtgtcaagttctatgccaagcacagggaagcaaaaacaggacacactcaacataaggtggccccaggaatcagtggccaggacacgggaggtgtgctgagcgcagatgggcagatgcaagctgaggtggcctgttggagggtcctggaccttccagaaaagaggacatcagctgctcagggagggaaggtttgagatggattctggctggtgtggatcagcccatggtgtgtttgcaggcagggacaccttgaacagacatgggctgaggggagtttgtgtggagcgtggccagtgaaggctgggctggccggcagggtccgctggtcatgggaggcctggcctgcagcagcagggcccatcaaagacatggggatggatggctgatggacaagatggctgatggacagcgttttagaaggtcgcaggcttgtttaggctgaggccagggagggttagggtcctcagggaaggagagtaagctaggggagcctcctgcatagaagacttcctacctgaggccgtcccctaggagttcagccaccccgtggagagcctggcgctgactgtggaagaggtgatggacgtgcgccgtgtgctggtgaaggccgagatggaaaagtttttgcagaacaaggagctcttcagcagtctgaagaaggggaaggtgaggctgcctagacgtggggctacgctcttgcccgctgggtcaggggcgggtgccgagagggccagttcccaggactgtttgctcatgatctggttgggagccctgagggggtagcagggacagggcgggaccccagggagctttggacaaagcggggctctaaccagtctctcctgacagatttgctgctgctgccgggccaagttcccgctgttctcgtggccgcccagctgtctcttctgcaagaggtgagccttccctttagctgtcagttcacaagggaaggaggaggcgagaaacctcggggcagtaccgcccacagaacttcctgtgattccaggaatgttctagcatgttcgatggctgatgagtccacaagatatggttagtacgaatgaggagttaaattttaaattgtatttaaattaaattaaatttaaatagctaagcaactcccagtttcagccaagatggggtaataggcatcttccacagccaagaacaaacaggatgtgaaacaatggttttcaagacagcaggcaacaaaaaggaaacacaacggggcaagcctgccatcaccacagtcattgcctggagagtttctaggtcatgagccacagctgccggactccccagatggaggaggtcaggctgagaatccagggagaccacagcagctcgagtccgccgtgtagaactccagaggagagggctgcgccgagaaagcctcagagaaggtccccctctctgaaggaaatgactgaaggctgcagaacatttatcctaaagcagagattggcagactatagccacgggccaaatctggtcctcggcctgttttgcaagtaaaatctcactggacacagccacacccatttattactcgctcagccacgcctaaaaggtttattctctggccctttacacaaaaaatttaccttcccttgttctaaagatctgaagggacggtgctcaggggcaggaatgagtaacatcggtttccaccggccacaggcagaaatgtcataattcacagggcactaactggaatgcacacaaaggactcgcctcactaacgtggagtaagtagcccaaagtgattgttgctctaggcctgactgatacatcataaaagcaagacctgaaaggatcaaactgttcacaagtatcttaactgattctgagaacaaagctcaagaataagaattttttaaacatcaacaaaaaa

SEQ ID NO: 70 - DNA, 3404 bp, Homo Sapiens
ggcccgagaacgtttaatcggaagccgctctcaagtgatccgtgcgtctctcttctgctcggtccgctctctggttaaaccctcaaaagagcgcgtatcccttcccgctcggagcagagtgccgacctccctttgcgcccgcggaggcgcagtccctcggctcacccggacgctgggggccaggcctaggactccagggctccgcgccccggagtcctgtgggccaacaggtgatgggagaggggctagactgggggcgcgccctgacagacccaggcaacgaccgcgcgggcaaaggctggcgtcccggggctggggcggggccgtcggaggggcggggcgggggctgccagacgggcgcgccagccgcgccaagcatccattacgcctctgccagacctgggcactccagggagccggtggcgccctcgctcgagaaggagtcgggaagaggagagtggctttcgggaagaggagagtggctttcgggaagcatctcctctgaggaagaggcggcggcggcggcggcatttacggagagaaaaagtaagcagctgcactttgccttcaagcgtcagactctgacacgcgctccctgtagcgatgataactgaccaacccgagagaacgtgcacaaggaaagtgagggaagggggtttcttatcttcctctagccacccccaaatgccccaggaggcccggcacctgcttcaagcggttcccagcgctagcccttgggtactgcgggccgcctcggggcttgtgaactcctagaacgccagctcttggtcgccgctgcgccctagaggcgtcgccgcctagaagccgggcgcactcgccgcccgccagccacagatcaccaccctccctcccatcacccccgcgccttttatacatcacacttctgcatctaaagaattcaggctcttagaatcagaatcctcttcacgtagcttgcacccagaagagcaaagagaactagacattctggctgcaggaacctctccccctagtgatgcagttatttatagcccaaactccagcccgagtctgcgtgtgttcgcgcgcggggtttcgccgcggcggtgcaaacttttcctctggtccgctattccagaggaatcacagtatgccagggctgaaggtttctgatcgctaacgtcaggggagtagaaatgtggttttggaggggatgagcgtgcgtttctagcagatgtccgtccttctgcaaacgcgtaaccgccagcttggaggcacggggttctctgaatgggttcagcatctatacaggttgcagatgtggaaagtggggtcagaaggtcaggctgaaagaaggactagaatttggcgccgggtttgaggggggcttgagcgaactaagaggagtgcacgatgagaataaagaaaaggtgcactaagttttcagaaatagatgaatcaaggacctatatgtaagtcccctcaacaccccgcccgataaccaccatgacctaaatttcataacagattcctctccctctacacatcaggaataagtaattatttctcttctgcttttaacagatcgaaaaatgaaacttagatacacagcctgaaagaccaggggggcgacgggatgaggggggttggggatgggattgtgacactgctcaaaagcaagagacttccattgacagggtttatttttccccagctccaactacaggcaccgaaaggtattttaccttctgtcaaaggttcaaagaaggaaaacataaccatatacaggcgtatctgtaacagcttgccaaataaaacctgccttctcctaccagaaccaaccctcagggttcaggtctttggcaaggattgggcactcggattcctcaattgctgcactatggggcaaataattggggactttgagtcgcccaggcggcatccttacaaattgcacagctccagcccgccccctgcctccacggcccgaccaagcccgctgggctgccgctgcccccatgaccgctgggcccgacgcgcagcgcgcgctgaatggagacatccccggccctcgggtcgcgcgccgcacgccgcgcttcacctccgcggcgttattgttccgtgctggcggccgagcgccaaccgcaggaccgcgccgccgcctccgacgcagtgagcacttcattagtaacccgagctttccgagctcatcgaagtctcggtccctctgggaaggctccgggctcccgccactcgccggcgggctggcggagacggtaggggctgcatttcccagtctccaacccaactctggccgcagctcccacagaaggcgaataaggagacaaggaagaccgagctagagagagatgtgacccgcctgaggtactaagaaataagctcgccggcagttcctccaaccccaccccacccccgttgctgctcacgccctccagactgcccgcgccagaaatcccgcacccgtcggatggacggctccgggcacagggctgtaggcggctcggaacagccctggttcgcgctcgctggtccgccaggagcggcctcagcggtgagggggcggggagccggcgggggagggtcgcccggcgccggaggcgcggccggcagcgccgcggacgagctggcttgtgcaggtagacatctaaataaataagtcagaacaaactttgctttcccatcaccttaccttccttcgcagcctgcgcctcccctgtgtgtgcaaagcggagcagccagatgtagcataaaataatccatgaagggtaccgagtttgaaaaaccatggtgcatgagcaggttttattttaggtttcagttatcttgagtcgtggatttttaaatgctgtttgttccgaagtagcttttgttttattgtgctccttgcatcgattccccttctcggtccccgatcggctgctccacgtttagctttttttaatttcccccccactcctgttcgctcgcaccgtgtttgctgcctgcaagtctccgactgcagaccggccgcttgctccacactccaataatatcaattagggggggagggggcggggctccgagctgagagcctccgccactcgggctgagtggcaggcacagccggcctgccaggaggcgattcccagggccaaggggcgggtcccggcgaaatggccgccccggccacgggggcggggtccgaggcaggagccaatcggtgccgagcggagtcaggttgctggtccaggattccctccaggttctgagctcgcgctggatgttcagaggagaacgaggatggtagccgaggtgtgtgctgctttggacgctctgcttttagcaaccgcagctttcgcgtagcagaataaatccgagaataacgctcccaacttacactcttttctatagctgtactccgcgcg

SEQ ID NO: 71 - DNA, 2304 bp, Homo Sapiens
cgattctcttgcctcagcctcccgagtagctagaattacaggtgtgagatatgcacccagctaattttttgtgtcttttagtagaaacggggtttcaccatgttggccacgctggcctcgaactcctgacctcaagtgatccacccaccttcgcctcccaaagtgttgggatttcaggagtgatcccgcatgcccagccatcaataaatacttactaagtgcctactttgttcccaagagtgctgggaacttagcagtgaacaaaataaataccttccctcggggaccttgaactcaagtctagtcagggatcactctattaagagatcaagtcaacactcaattctcctacagactcagataggatagtattttaatttctcgttgatctgctccctcagaccctagaccatgggcactgcagatttttgcaccttttgtagaggcagggtttcaccactaccagagactttaccatcatttctatgtgaagggaaacagtgccctttcagtagacaacgttaaatcagccatcagacgtgggtcatggtgggtttgccgtgactgccacaaacacgcctcaccgaagtctgccaggggacgccataccctcccctagaaagtaagaaacagagaaaggctttctcctgccccggactgtctttctctcagctctaagaaatttctttacagctgttactttatcctggcctgtctcttgagtaagaaaactgctggaaagagtctgccattcactcagatcataatcagggagcctgctgtcactcaggaagggctttaaaaaattcttctgatttactgtgagtgcaaatctctgatattcctgcatctccccatccatcttattttgattttacacatagtgcgattttgaaaggaagcggtgtttttggagaggtagaaaaactctggaaaataaggcttatgacgttggccatcagcacggggctgctgtctgctgtgtgacatgctcaggggtgacgcgcctcccgaaagagacacttggtagagaaggcacgggcgcgaagcccggctgcgggagagctgggagcctgaatgtcgctggctgccgttcacagcaggctctctctgagcaccgtggggaggcagtgacacccgctggcctcgcagcgacactccggcagctgtcctgttttccagcctggacgtgataggtgtgtcttggaggacagtcagaggaagacaggcaagccatactggcctccctcgaggttataccctcgcttaggttaggttgcttctaacagacatcctccgcgggcgttgaggcagccagcttcactgtcacccagacaatttttctctcgctctgccaaccctgttcccctttcaagaatgtttaaactcttcattcaagcgatgagagggaaacacttgagctgcacactcaaggagatgtgggtttccattctggccttgcgatatattattggtgggaccgtgggtgagtcacttaacttctctagtcctcagttttcttatctgtaaagtgggctccagcatacggcttaactgaggtaacacacgttgttcatgtcagctgttgctttcatgccggctctgcctaggtctccccatggcaacaggataggagttctctgcctgtgcgtcagtttttcactagcgtgggaatgctgtgaggagggggcggaactcggtgtagcaagggtttctgtccgtatcttctattttttttttttttttttttttgagactgagtcttgctctgtcgctcaggctggagtgcagtggcgcgatctccgctcactgcaagctccgcttccagggttcacgccattctcctgcctcagcctcccaagtagctgggactacaggcgcccgccaccaagcccagctaattttttgtatttttagtagagacggggtttcaccgttttagccgggatggtctcgatctcctgacctcgtgatccgcccgcctcggcctcccaaagtgctgggattacaggcgtgactaccgcgcccggcccgtatcttctattaagaaccagcaaccacgggctgggcgtggtggctcacgcctgtaatcccagcacttagggaggccaaagtgggcggatcacgaggtcaggcgatccagaccatcctggataacacggtgaaaccccgtctctactaaaaatacaaaaaatttggcaggcgtggtggcgggcgcctgtagtcccagctactcgggaggctgagggaggagaatggcgtgaacctgggaggcggagcttgcagtgagccgagatggcacca

SEQ ID NO: 72 - DNA, 2280 bp, Artificial Sequence
  chemically treated genomic DNA (Homo sapiens)
attagtatagaattgttattataggatcgtagtttaagtattagagtgatattaattggttatgtttaattgttttaaaattattttttaaataattatattgatattataatagaaattatgggtatttattttatatttagatggaaggtattattggatatgtattaaaaaaaagattttttgaaaaaaataaaataaaataaaatattattattaaaataaaagaatttaaaataatttttaaaaattttttttaataaaatatattgttaatttataaaatggattgatgattagttatgtaaatgttttaaataaaatttttatattttttttatagttaatttatgttttgaattgtttatcgattataaataatggcgaaatggtattttttgattatattgtattttgtttatagaaagtttgatacgatggaatttattaggtaagagggtgggtgttgtgaacgagatgtcgtttttagtcgcgggggcgggtagagtttttggagcgcgtggattttatgcgagttatgtagtattttttgttttttgttagaagttaaagttatttatttataatatatttatgttttcgtgtaattgtttatttttgcgtagttaatagggagttattacggggttaatttataggggaaaaatagatatttatttttttatatagatgtggatatatgtatatatgtatagaatcgcggtatttaattttataggtttcggggtcgagggcgagggtattgttagtttttttagtagggtcgtgttgggttttttgttaaaaggggtttttagtaaagagcgagttggttgcgtttttttagttttttatagtttgttttttgttttaaggagggagttaagtaaggggttaggttttttcggttgtgcgagtttatagttatttatttatttatgtttatttaggttgatggcgcggggatttgggtatacgtttttttagttttcggggtgtttgcggtggggaaggatgtatcgttttttttttgtttttttttattggggttggggttttagtttgagagcgagtgagagttatagttatatattttgtgggttttatttgcgttgtaaggtttattgtgttagtaggaagagttatagattgtttgtagggaattaatttcggacgcggaggagttggtatttcgttttttggatcgttttcggttttttaggataaatacgagtatgtttattacggtgaaggcggaggtgataaatattagtagtagtttcgggattaatatcgagatggatattttgttggtgtttaggtaggagttggagtgcgtttcggttttcgttaatttagtgttgtttttattgtgcgaagttaacgtgggcgagattttagcgtatagttgagggtagatttcgttattggagaggagtatgaaattttttttaaagaagtttatcggcgttttatatttgaggtcgtttattagtatttcggaatttaagcgttttgtttattgtttgaaaggtataattgtgtaggagtatttttaggggttttcgtggaggtttatttggatgatggaggttaattggtttagtatttttgttatcgggaggtatatgaagtaattgttgtgtaggttgagtttagagagcgagattttagcgaatacgtttataggtagggattttagtaggttgttgttgagaatgaggatttttagtttgggtatggtattgaaagtgttcgggaggatgagttggatagcgttgtattttacgtttaggtattttaggttttgtagtttcgcgaatttttttcgggatagcgtgtttaggtaattgttatttatgtatagttatttgaggtttaaaaggtttttgaaagtgttgttttttatagtagcgatgttattgttgtttagatttaatagaatgaggtttttgtaatttataaagtgcgattttcggatgttgtggattttgttatttcgtaggaaaagtttttgtacgttagagagtttgggttttaaattagttaagttgtttacgtttttgttgttgtagtttatttttaaattcgattttgggatgtggtcgtagttgtagtttttagggtagggtaaattgttagttaagggtttgtttttggagttattcgtcgttatcgttgttgtgggtttgattttgatttgttagttgtttgggatttttgtattttcgtttggagtagattttggtgtggtatgatttttttgtttatttgttttga

SEQ ID NO: 73 - DNA, 2280 bp, Artificial Sequence
  chemically treated genomic DNA (Homo sapiens)
ttaagataaatgggtaagaggattatgttatattagggtttgttttaaacggaggtataaagattttaggtaattggtagattaaaattagatttatagtagcgatagcgacgggtagttttaggaataaatttttagttaatagtttattttgttttgggggttgtagttgcgattatattttagggtcgggtttaaagatgaattgtaataataggaacgtgagtagtttggttgatttgaagtttaagttttttaacgtgtaggagttttttttacgagataataagatttatagtattcgaaaatcgtattttgtggattataagaattttattttgttggatttgggtaataataatatcgttattgtagagaataatatttttaagaattttttggattttaggtggttatatatggatagtaattatttggatacgttgtttcgggagaaattcgcggggttgtaaaatttagagtatttgaacgtggagtataacgttatttagtttattttttcgggtatttttaatgttatgtttaaattgaggatttttatttttaataataatttgttgaggtttttgtttgtggacgtgttcgttggggtttcgttttttaaatttagtttgtataataattattttatgtatttttcggtggtaggggtgttggattagttaatttttattatttagatagatttttacggaaatttttgggagtgtttttgtataattgtgttttttaagtagtgggtagaacgtttgggtttcgaagtgttgatgagcgattttaagtgtgagacgtcggtgaatttttttagaaaggattttatgtttttttttaatgacgagatttgtttttagttgtacgttaggatttcgtttacgttaatttcgtatagtaaaaatagtattgggttggcggagatcgggacgtattttaatttttatttagatattagtagggtgtttatttcggtgttggtttcgggattgttgttggtgtttgttattttcgtttttatcgtggtgggtatgttcgtgtttattttgaggaatcgaaagcggtttaagagacgagatgttaattttttcgcgttcgagattaattttttatagatagtttgtgattttttttattggtataatgggttttataacgtagatggggtttatagagtgtatgattgtggtttttattcgtttttagattaagattttaattttaataggggagggtagagggaaggcgatatatttttttttatcgtaggtatttcgggggttggaggggcgtgtatttaaattttcgcgttattagtttggatgggtataagtagataaataattgtgagttcgtataatcgaaagggtttgattttttatttagttttttttttgaaataaagagtagattgtggagagttgggagagcgtagttagttcgttttttgttgagagttttttttgatagaaagtttagtacgattttgttggaagaattgatagtgttttcgttttcggtttcggggtttgtggggttggatgtcgcggttttatatatatatatatatatttatatttatatagagagatagatatttattttttttttgtggattagtttcgtgatggttttttgttggttacgtagggatgggtagttgtacgaaggtatgaatgtattgtaaataagtaattttgatttttgataaaaaataaaaagtgttgtatggttcgtatggaatttacgcgttttagggattttgttcgttttcgcgattggagacggtatttcgtttatagtatttatttttttatttgataagttttatcgtattaaattttttataaataaaatatagtataattagaaagtgttatttcgttattatttgtgatcggtaggtagtttagagtataagttaattgtgaaaaaaatgtaaaggttttatttaggatatttgtatggttagttattagtttattttatgagttaataatgtattttgttgagggaagtttttaggggttgttttgggtttttttattttgatggtgatgttttattttattttattttttttagggggttttttttttaatatatatttaataatgttttttatttgaatgtaaaataagtatttatgatttttattatagtattagtgtaattatttaaaaaatgattttgaggtagttaagtatgattaattaatgttattttagtgtttaggttgcgattttatggtagtaattttgtgttggt

SEQ ID NO: 74 - DNA, 2345 bp, Artificial Sequence
  chemically treated genomic DNA (Homo sapiens)
gcgttcggtcgttatttttttttaattttattggtgttcgcgggttgaagggttaggacggattagaggcgagtaatttcggtggtattaggtatttttcgatttgttcgggtcgttagttgtacggattttgggtagatgcgcgtagcggttgcggtatagggcggggagcggttgttcggttttattttaaggtagtagaatgtttagagttggtttttggttttaggcgtaggtcgagtagtagttgggcgggtagcggcgtcgggtaggtttttttagtcgggttgataggtcgttttgatttagttattagatttcgtttgcgttttggtagcgcggattttagggtaatttcgttgtagtggttaagtcgggggcggaattggtttatatttttgaatcgagtaagtttaggagtaggtgcgtcggcggcgttgtgaagcggtatttatgataggtaggttgggcgtcgttatttcgaaattttcgagggaggattagttagtttaggttggcgttggagttgtagcgttatttgtaggttaagaagtttttttttgggaggttggagttgtagcgttatttgtaggttaaggagtttttttttgggaggttggagttgtagcgcgacgtgtaggttaaggagtttttttttgggaggttggagttgtagttgtagtgaagttataggtttcgtgacgttataggtgggtaggcgtattagtttgtaacggattggtttggttttattcgcgaggttttgtagtggttgtttggtttggtagtggtcgtttggtttggcgtggtagtgatcgtttggtttggtatttttggtttagcggtttttttttcgtagattggaaatcgcgggttattttgttgggaggttgtggtcgaggtagtagttcgttattgatggttttttggggtggagaaaagcggggaggggttgaggggttttcgaagtcggtagtttacgttacgaggaaaatcggtagcgttaggagttaggaggattagtggtatttgggttattcgggggattagtggttttcgggttttttttatagttggtggaaaaatagcgtcggtagcgagagtaagtacggtgagggcgttttagattagttttagtacgatgttcgtttggaagattttggcgagttttatagagttgttcggtcgggcgacgtttttggggtggagtacgttttggtttttggagatattggcgtggataagagggataggaagaagaggtaatggttaggcgaaggatgcgggcgcgtcgttttgtcggggatattggttttttggtgttcgtaggttttacggtattcgggatggggaaacgttagaggggttaggggtttaggttttttagtgagacgggattaaatataaaggattattattattgtaaaagtgttggtttattttataggagttttttttaaaaatattgtattttttaattgtgtttatttatttttttaatttatttattaaatataagggtcgggcgcggtggtttacgtttgtaatattagtattttgggaggtcgaggcgggcggattacgaggttaggagatcgagattacggtgaaatttcgtttttattaaaaatataaaaaattagtcgggcgtagtggcgggcgtttgtagttttagttattcgggaggttgaggtaggagaatggcgtgaatttagaaggcggagtttgtagtgagcggagatcgcgttatagtattttcgtttgggcgatagaacgagatttcgttttaaaaaaaaaaaaaaaaaaatataaattgaatatttattatatagtagatatattttattgtcgtttaggttttttttatttttaagaattttatgttggtcgggttcggtggtttatgtttgtaattttagtattttgggaggtcgaggagggtagattacgaggttagaagttcgagattagtttgatcgatatggtgaaatttcgtatgttatgtttttgttttagtttagatttagttaaaatttttatgataaattattttttaggttttcggggtttagtttaaataatgttgtagaaagagatgagttttttttttttattgttattagatttgtatgttgaggattttttttttagatcgtggaatgttttatattatttttttttagatttgtggtaggaagttattattagaattttgagttttaagtatgttagttggatttaatagagttaagttttatttatgatttatgaatatttatgtataaaatgagagttttggtagggtgtagtggtttatgtttgtaattttagtaatttgggaggtt

SEQ ID NO: 75 - DNA, 2345 bp, Artificial Sequence
  chemically treated genomic DNA (Homo sapiens)
agttttttaaattgttgggattataggtatgagttattgtattttgttaaagtttttattttatatatggatatttatgagttatggatgagatttagttttgttaaatttaattaatatgtttgagatttagaattttggtgatggttttttgttataaatttgggaaaggataatatgggatattttacgatttaagaaaagggtttttagtatatagatttggtagtaatgagaaaaggaaatttatttttttttgtaatattatttgaattgaatttcgagggtttaaaggataatttgttatgaaggttttagttaagtttaggttgagataaaagtataatatgcggggttttattatgtcggttaggttggtttcgaatttttgatttcgtgatttgtttttttcggttttttaaagtgttgggattataggtatgagttatcgagttcggttaatatgaagtttttaaggatggaaggaatttgagcgatagtagaatatgtttgttgtataataggtatttagtttatgtttttttttttttttttttgagacggagtttcgttttgtcgtttaggcgggagtgttgtggcgcgattttcgtttattgtaagtttcgttttttgggtttacgttatttttttgttttagtttttcgagtagttgggattataggcgttcgttattgcgttcggttaattttttgtatttttagtagagacggggttttatcgtggtttcgattttttgatttcgtgattcgttcgtttcggttttttaaagtgttggtattataggcgtgagttatcgcgttcggtttttatgtttgatgaataaattgagaaaatggataaatatagttgggaagtgtaatatttttaaagaaaatttttgtaaagtagattaatatttttgtaatagtaataattttttatatttgatttcgttttattaagaggtttgggtttttgatttttttgacgtttttttatttcgggtgtcgtggggtttgcgggtattagaaagttagtgttttcgataggacggcgcgttcgtatttttcgtttggttattattttttttttttattttttttgtttacgttagtgtttttaggaattaagacgtgttttattttagggacgtcgttcgatcgggtagttttgtggagttcgttaagattttttaggcggatatcgtgttggggttggtttaaggcgtttttatcgtgtttgttttcgttgtcgacgttgtttttttattagttgtaggagaagttcgaggattattggtttttcgggtagtttaagtattattggtttttttggtttttgacgttatcggtttttttcgtggcgtagattgtcggtttcggagattttttagttttttttcgtttttttttattttaggagattattagtagcgagttattgtttcggttataattttttagtaggatagttcgcggtttttaatttgcgaaaggaggatcgttaagttagaaatgttaagttaagcgattattgttacgttaagttaagcgattattgttaagttaagtagttattgtaaagtttcgcgggtaaggttaagttaattcgttatagattagtgcgtttgtttatttgtgacgttacggaatttgtgattttattgtaattgtagttttagttttttagaaaaagattttttggtttgtacgtcgcgttgtagttttagttttttagaaaaagattttttggtttgtaggtggcgttgtagttttagttttttagaaaaagattttttggtttgtaggtggcgttgtagttttagcgttaatttgggttggttggttttttttcggaggtttcggggtggcggcgtttagtttgtttgttatgagtgtcgttttatagcgtcgtcggcgtatttgtttttaggtttgttcggtttaggggtatgggttagtttcgttttcggtttggttattgtagcgaagttgttttagggttcgcgttgttaggacgtaagcggagtttgatggttgggttagagcggtttgttagttcggttggaagggtttgttcgacgtcgttgttcgtttagttgttattcggtttgcgtttggagttagggattagttttgggtattttgttgttttaggatggggtcgagtagtcgtttttcgttttgtgtcgtagtcgttgcgcgtatttgtttagggttcgtgtagttggcgattcgggtaggtcggggaatgtttggtgttatcgggattgttcgtttttagttcgttttgattttttagttcgcgagtattagtgagattgaagaaaagtgacggtcgggcgt

SEQ ID NO: 76 - DNA, 2605 bp, Artificial Sequence
  chemically treated genomic DNA (Homo sapiens)
gggtgtcgtagttcgggtgtagagggaaaaaaggatttatagatttgtggttcgcgtcgcgcgcgtacgttgcgttagggttttaggttggcgcgtattttttttttggtttttttagttcgattgtttttgtttttattttataggtttgggatgtatttttttatttgttgttgtttttttttatgggtttttgtttttatttttaagaattttaattatttcgtgtcggaggagtaaggggtcggtacggtgatcgggaatatcggtagggatgttcgattgtagtttgggttttcgtttgtagagcgcggcggcggagggcgtagtaagtcgggtagttatcgggtgttggagaatttcgtatcgtatttgttggacgtggacgtagatagcgggtttttttatattaagtagcgtatcgatcgcgagtttttgtgtcgttataatgttaagtgttagttgtttttcgaggtgttcgttaacgataaggagatttgtatgattaaggtagagatttaggatattaacgataacgcgtttttttttttttcggattagatcgaaatggatatttcggagaacgttgtttcgggtattcgttttttttttattagcgtatatgatttcgacgtcggcgagaatgggtttcgtatttatttgtttacgcgcgacgattacggtttttttggattggacgttaagtttcgcggcgacggtattaagtttttagaattggttatttagaaggttttggatcgcgagtaatagaattattatacgttcgtgttgattgttttggacggtggcgagtttttacgtttcgttatcgtatagattaacgtgaaggtgattgattttaacgataatagttcggttttcgaggcgttattttatttggtggaattgttcgagaacgtttcgttgggtatagtggttatcgatttgaacgttatcgacgtcgatgaaggttttaatggtgaagtgttttatttttttagtagttacgtgtttgatcgcgtgcgggagtttttttttatcgattttaagatcggtttaattcgtgtgaagggtaatttggattatgaggaaaacgggatgttggagattgacgtgtaggttcgagatttggggtttaattttattttagtttattgtaaagttacggttaagtttatcgatcgtaacgataatgcgtcgtttatcggtttcgttttcgtgcgttagggggcgttgagcgaggtcgtttttttcggtatcgttatcgttttggtgcgggttattgatcgggattttggtaagaacggatagttgtagtgtcgggttttaggcggaggagggacgggcggcggcgggggtttgggcgggttcgggggtttcgttttttttaagtttgaggagaattacgataatttttatacggtggtgattgatcgttcgttggatcgcgagatataagacgagtataacgtgattatcgtggcgcgggacgggggtttttttttttttaattttattaagtcgttcgcgattaagattttagacgagaacgataattcgtttcggtttattaaagggttttacgtgttttaggtgtacgagaataatatttcgggagagtatttgggttttgtgttcgtttaggatttcgatttgggttagaacggtatcgtattttattttattttgttttcgtatatcggcgacgtgtttatttatatttatgtgtttgtgaattttacgaacggggttatttacgttttgcgtttttttaatttcgagtagattaaggtttttgagtttaaggtgtttgttaaggattcgggggcgttcgcgtatttggagagtaacgttacggtgagggtgatagtgttagacgtgaatgataacgcgttagtgatcgtgttttttacgttgtagaacgatatcgcggagttgtaggtgtcgcgtaacgttggtttgggttatttggtgagtattgtgcgcgttttagatagcgatttcggcgagagcgggcgttttatttacgagatcgtggacggtaacgacgattatttgtttgagatcgattcgtttagcggcgagattcgtacgttgtattttttttgggaggacgtgacgttcgtggtggagttggtggtgaaggtgatcgattacggtaagtttattttgttcgtagtggttaagtttattattcgttcggtgagcggattttttttcgagggggtattacgggtgaatggcgagtagtattattgggatatgtcgttgtcgtttatcgtgattttgagtattatttttattatttttttagcggttatgattattatcgtcgttaagtgtaagcgcgagaataaggagattcgtatttataattgtcgtatcgtcgagtatagttattcgtagttgggtgggggtaagggtaagaagaagaagattaataaaaatgatattatgttggtgtagagcgaagtggaggagaggaacgttatgaacgttatgaacgtggtgagtagtttttttttggttattttttttatgtatttcgattattagattcgtttgttttttagttcgtttcggtcggaggtgatgtattttaaat

SEQ ID NO: 77 - DNA, 2605 bp, Artificial Sequence
  chemically treated genomic DNA (Homo sapiens)
gtttgagatatattattttcgatcggggcgagttgaggggtaggcgggtttggtagtcgaagtatatgggggaggtggttagggaggggttgtttattacgtttatgacgtttatggcgttttttttttttatttcgttttgtattagtatgatattatttttgttgatttttttttttttgtttttgtttttatttagttgcgggtggttgtattcggcgatgcggtagttgtaagtgcggatttttttgttttcgcgtttgtatttgacggcgatggtgattatggtcgttaggaggatgatggagatagtgtttagagttacgatgagcggtagcgatatgttttagtggtgttgttcgttatttattcgtggtattttttcgggaagggattcgtttatcgagcggatgatgagtttggttattgcggatagggtaggtttgtcgtggtcggttatttttattattagttttattacgggcgttacgtttttttagaaagggtgtagcgtgcggatttcgtcgttggacgggtcgattttaaataggtggtcgtcgttgtcgtttacgatttcgtaggtgagacgttcgttttcgtcgaagtcgttgtttagggcgcgtatagtgtttattagatagtttaggttagcgttgcgcggtatttgtagtttcgcggtgtcgttttgtagcgtggggagtacgattattggcgcgttgttatttacgtttagtattgttatttttatcgtggcgttgttttttaagtgcgcgggcgttttcgagtttttagtaagtattttgaatttaaaagttttggtttgttcgaagttaaaggagcgtagggcgtagatggtttcgttcgtgggatttatagatatataggtgtagatagatacgtcgtcgatgtgcgagggtaggatagagtaggatacggtgtcgttttggtttaggtcgggattttgggcgagtatagagtttaggtattttttcgggatgttgttttcgtgtatttgaagtacgtagagttttttggtgaatcgaggcgggttgtcgttttcgtttagaattttgatcgcgaacgatttggtggagttgaggggaggagagttttcgtttcgcgttacgatggttacgttgtattcgttttgtgtttcgcggtttagcgggcggttagttattatcgtgtagaagttgtcgtagttttttttaagtttgaaggggacggaattttcgggttcgtttaggttttcgtcgtcgttcgtttttttttcgtttaggattcgatattgtagttgttcgtttttgttagagtttcggttagtgattcgtattagggcgatgacggtgtcgggaggggcggtttcgtttagcgttttttggcgtacggagacgaaatcgatggacggcgtattgtcgttgcggtcgatgagtttgatcgtgattttgtagtgggttgggatagggttaggttttaggtttcgggtttgtacgttaatttttagtatttcgttttttttatagtttagattgttttttatacggattaggtcggttttggggtcgatggagaagagttttcgtacgcggttaggtacgtagttgttgaaagagtagagtattttattattgggatttttatcggcgtcggtggcgtttagatcgatgattattgtatttagcggagcgttttcgggtagttttattaagtaggatggcgtttcgaagatcgggttgttgtcgttggagttaattatttttacgttgatttgtacggtggcggaacgtggaggttcgttatcgtttagggtagttagtacgagcgtatggtgattttgttgttcgcggtttagagttttttggatgattagttttgggaatttggtgtcgtcgtcgcgggatttaacgtttagtttaaagaggtcgtgatcgtcgcgcgtgagtaggtaggtgcggagtttattttcgtcggcgtcggggttatgtgcgttggtgagggggaagcgggtgttcggagtagcgtttttcgagatgtttatttcgatttggttcgaggagaaggagggcgcgttgtcgttgatgttttggatttttattttgattatgtagatttttttgtcgttggcgaatatttcgagggatagttggtatttggtattgtggcggtatagggattcgcggtcgatgcgttgtttggtgtagaggagttcgttgtttgcgtttacgtttagtaggtgcggtgcggagttttttagtattcggtagttattcgatttgttgcgtttttcgtcgtcgcgttttgtaggcggaagtttaggttgtagtcgagtatttttgtcgatgttttcgattatcgtgtcggttttttgttttttcggtacggagtagttgaggtttttgagagtgagggtaggggtttatagaagaaagtagtaatagatggaaaggtatattttagatttgtaaggtgggggtaggagtaatcggattggaggagttagagagggagtgcgcgttagtttggggttttggcgtagcgtgcgcgcgcgacgcgagttataagtttatgggtttttttttttttttgtattcgagttgcggtattt

SEQ ID NO: 78 - DNA, 2477 bp, Artificial Sequence
  chemically treated genomic DNA (Homo sapiens)
tggtatagatatggtttttaaagttaaaaattatgatggagtgaaggatagttgtgtttagatttgcgttttgttttttggaggttgttgtggttttggggatgagtcggaggtgggtaggtagcggttttcggggtttgtagtagggaggttattatttgtatagtagaatatagtattattttatagggagtatttcggggcgggtagtaattttggaggtattttcgggaaggagttaggtatgggggaggcggaggcgattttagaagtagaggagtcgttggggagttacggttttttgggtgtggagttgtggaggatgagtgttatttttttttttcgggttttttattttgtagggatttttacgtttaggattatttgattgttaaggtttcggtattttcgttaggttagttgggggttaaggtttttaatttcgaggattggggtcgttaatatgggtagtagtataggaggtcgagaggaggtttataagggttgtattttttttttggttgtagtttattttttagagtagggcgggcgtggagttatttttattagtattgttggttttgagggtttggtgggtagtgtcgtttggtgtgggggatagtttttgagtaggttgtcgtatttttggtattttggtttttttgggatttttaggtggtttacgttcggtagtgttcgttttttgggtttttagggttcgtttttgttgtagtttttgtagtgggagtatcgttgagtattgtttttgggagaggacgattttaggttttatagttaagttgttttgaggttaagtgtttcggggtttagggagttttagtagtagtttcgtacggttaggtttgggttacggtgttgtttagtggtttttgcgcggttagtatttgaatggttgttcgtttggtttggcgtgtttttttttttcgggttttttttttggttgtttttttttgttggtgtaggtttaagagggttttttcgtttgatcgttgtcgttgtttttgttaaagaagtcggtgttatgtggcgtttatatttggaagacggaatttagatttagattagaggtttttttataacgttttggagttttttagagttcgtggaattttagggttagtagggaaagtgaaattttattaggattttgaatttgttatttttttgttttatagaggatgagttttacgtcgtaggtggttaatagttttggcgtgggggagatagttttgtttttatagaacgtttttttgagattttttagtttgggatggatttagtaggcgttttttgatatttaggttttgaggatcgttagtgaggattattttgattgttcgcggggatttagggttaagaaggatgttgtatttagagacggggtttacgagtaattttaggttttgattttatttgttttagaaatttaaatttttgggattttgggttagatttttcgggggagtatggagtgattgagacgtttatattgatttttcgtttggtttgaagtaagtgttttaggcgggtagtttttgtttcgcgtcgttgtatttggtgtcggtattagcgttggatggtgatagtggtttggtttatttggtggataaatttgttcggagagtaggatttagggttaagataggattagcgtttcggtaggatttagttggttgttggtggaaggtcgagtcggggaagagagaagtcggcggttgtatttaagtagttttttttataaggtaggattagtttatttggattatttttatatggtaggattagtcgtttggattagttttattaaaatttaaaattttttttttgggaaggtgtttaggggagaggaaacgtttatttacgtaggtttgtgtggttttatttataattgttaggaagtgggaagagtttaaatgtttatgatttggttatagcgtgaatattggatggcgggattttatttataggtaataggttcgggatttaggttagtgtagattataggtcgtggttttatagagagggtggtcggaataggtagggttatgagggaatagattggtggttgttggtatttgggcggggaaggagttcgagggaagtttggtggtgttgggtcgtttttttattttggtttgttgtgtttatagatagtattatatattttggtggaattttatggaattgtatatttataatgggtattttttattgtatataaattatattaagtaaaattgattaagtaaaaaaaaaaatgttttattttggttttcgggattatgtgtggatttttttagtaaaggtattaatagagaatttagaacgtgtgagttttagttcgggagtagtttgtttcgggtagaattggggggttttaaggggttgcgggtttttggttttttttttttcgtgttatttatcgcgtttataggtttggtttttttagttttaat

SEQ ID NO: 79 - DNA, 2477 bp, Artificial Sequence
  chemically treated genomic DNA (Homo sapiens)
gttagggttagggagattaggtttgtagacgcggtgggtggtacgagggaagggggattagaagttcgtaattttttgaagttttttagttttgttcggggtagattgttttcgagttagggtttatacgttttgggttttttgttagtgtttttgttgagagaatttatatatggtttcgagagttaaggtgaagtatttttttttttgtttaattagttttatttagtataatttgtatataatagaaggtgtttattgtaagtgtgtagttttatgagattttattagggtgtatagtgttgtttgtggatatagtagattaagataaggaaacggtttagtattattaggtttttttcgagtttttttttcgtttagatgttagtagttattagtttgtttttttatagttttgtttgtttcgattattttttttgtggagttacggtttgtggtttgtattggtttgagtttcgggtttgttgtttgtgggtagggtttcgttatttagtatttacgttgtagttaggttatgggtatttgaattttttttattttttggtaattgtaaataaggttatataggtttgcgtgggtaggcgtttttttttttttgggtatttttttaggaagaaggttttgggttttagtggagttggtttaggcggttggttttgttatgtgaaaatggtttaggtgggttggttttgttttgtgaaaagggttatttgagtgtagtcgtcggtttttttttttttcggttcgattttttattagtagttagttgggttttgtcggggcgttggttttgttttggttttgagttttgtttttcgggtaggtttatttattaggtgaattaggttattgttattatttagcgttggtatcggtattaggtgtagcggcgcggagtaggagttgttcgtttggagtatttgttttaggttaagcgggaggttagtgtgggcgttttagttattttatgttttttcggggggtttggtttagaattttaggggtttgagtttttgggataggtggaattaaagtttaggattgttcgtgggtttcgtttttgggtgtagtattttttttgattttgggttttcgcggatagttagggtggtttttattggcggtttttagggtttgggtgttaggaaacgtttgttgggtttattttaggttggagagttttaggaggacgttttgtgggggtagagttgttttttttacgttagaattgttggttatttgcgacgtagggtttattttttgtagagtagagaaatggtaggtttaaggttttggtggggttttattttttttgttggttttgagattttacgaattttaggggattttagggcgttgtggggaaatttttggtttgggtttggatttcgttttttagatgtaaacgttatatggtatcggtttttttggtaggagtagcggtagcggttaggcgaggggatttttttggatttgtattagtagaaagaggtagttaggaggaaggttcgggaggagaaggtacgttaagttaggcgagtagttatttaggtgttgatcgcgtagggattattgagtagtatcgtggtttaggtttgatcgtgcggggttgttgttggggttttttgggtttcgggatatttagttttagggtagtttggttgtggagtttggggtcgtttttttttagggatagtgtttagcgatgtttttattgtaggagttgtaatagaaacgagttttgagagtttagaaggcgagtattgtcgagcgtgggttatttgagaattttagggagattagagtgttaggaatgcggtagtttgtttaggagttgttttttatattaggcggtattgtttattaggtttttaaggttaataatattggtgagagtggttttacgttcgttttgttttggggggtggattgtagttaggaaggaagtgtagtttttgtggattttttttcggttttttgtgttgttgtttatgttggcggttttagttttcggagttaggggttttggtttttagttgatttgacgagggtgtcgagattttgataattaaatggttttggacgtagggatttttatagagtagaaggttcggaagggaggggtggtatttattttttatagttttatatttagaaggtcgtggttttttagcggtttttttgtttttggggtcgttttcgttttttttatgtttggttttttttcgggggtgtttttagagttgttgttcgtttcgggatgttttttgtggaatggtgttgtgttttgttgtgtaggtggtggtttttttgttgtaggtttcggagatcgttgtttgtttattttcgatttatttttagaattatagtagtttttagaggataggacgtaggtttgagtatagttgttttttattttattatggtttttggttttaagggttatgtttgtgtta

SEQ ID NO: 80 - DNA, 2291 bp, Artificial Sequence
  chemically treated genomic DNA (Homo sapiens)
gttttaattttagtatatgtttgttgttgaagtaagttttgtttgttttagattgagttttgttttgttatttaggttggagtgtagtggcgtgatttcggtttattgtaagtttcgttttttgggtttatgttatttttttgttttagttttttgagtagttgggattataggcgtttattattacgttcggttatttttttttgtattttttagtagtgacggggttttatcgtgttagttaggatgtttttaattatttgatttcgtgattcgtttattttaggtttttaaattgttgggattataggtatgagttattgtattttgttaaagtttttattttatatatggatatttatgagttatggatgagatttagttttgttaaatttaattaatatatttgagatttagaattttggtgagggttttttgttataaatttgggaaaggataatatgggatattttacgatttaagaaaagggtttttagtatatagatttggtagtaatgaaaaaaggaaattcgtttttttttgtaatattatttgaattgaatttcgagggtttaaaggataatttattatgaaggttttagttaagtttaggttgagataaaagcgtaataggcggggttttattatgttggttaggttggtttcgaatttttggtttcgtgatttgtttttttcggttttttaaagtgttgggattataggtatgagttatcgagttcggttaatatgaagtttttaaggatggaaggaatttgagcgatagtagaatatgtttgttgtataataggtatttagtttatgtttgatgaataaattgagaaaatggataaatatagttgggaagtgtaatatttttaaagaaaatttttgtaaagtagacgaatatttttgtaatagtaataattatttatatttgattttattttattaagaggtttgggtttttgatttttttgacgtttttttatttcgggtgtcgtggggtttgtgggtattagaaagttagtgtttttgataggacggcgcgttcgtattttttatttggttattattttttttttttattttttttgtttacgttagtgtttttaggagttaagacgtgttttattttagggacgtcgttcgatcgggtagttttgtggagttcgttaagattttttaggcggatatcgtgttggagttggtttaaggcgtttttatcgtgtttgttttcgttgtcgacgttgtttttttattagttgtaggagaagtttaaggattattggtttttcgggtagtttaagtattattggtttttttggtttttaatattaggggtttttttcgtggcgtagattgtcggtttcggagattttttagttttttttcgtttttttttattttaggaggttattagtagcgagttattgtttcggttataattttttagtaggatagttcgcggtttttaatttgcgaaaggaggatcgttaagttagaaatgttaagttaagcgattattgttacgttaagtagttatcgtaaagtttcgcgggtaaggttaagttacgcgggtaaggttaagttaattcgttatatattagtgcgtttgcgtatttttgacgttattgaatttgtgtttttattgtatttgtagttttagttttttagaaaaagattttttggtttgtaggtggtgttgtagttttagtgttaatttgggtcggttggttttttttcggaggtttgggggtggcggcgtttagtttgtttgttatgagtgttgttttatagcgtcgtcggtgtatttgtttttaggtttgttcggtttaggggtatgggttagtttcgttttcggtttggttattgtagcgaagttgttttagggtcggcgttgttaggacgtaagcggagtttgatggttgggttagagcggtttgttagttcggttggaagggtttgtttaacgtcgttgttcgtttagtttttatttggtttgcgttcggagttagggattagttttgggtattttgttgttttaggatggggtcgagtagtcgtttttcgttttgtgtcgtagtcgttgcgcgtatttgtttagggttcgtgtagttggcgattcgggcgggtcggggaatgtttggtgttatcgggattgttcgtttttagttcgttttgattttttagttcgcgagtattagtgagtttgaagaaaagtgacggttgggcgcggtggtttatatttgtaattttagtattttgggaggttgaggtgggtagattatttg

SEQ ID NO: 81 - DNA, 2291 bp, Artificial Sequence
  chemically treated genomic DNA (Homo sapiens)
taagtgatttgtttattttaattttttaaagtgttgggattatagatgtgagttatcgcgtttagtcgttatttttttttaaatttattggtgttcgcgggttgaagggttaggacggattagaggcgagtaatttcggtggtattaggtatttttcgattcgttcgggtcgttagttgtacggattttgggtaaatgcgcgtagcggttgcggtatagggcggggagcggttgttcggttttattttaaggtagtagaatgtttaaagttggtttttggtttcgggcgtaggttaagtaggagttgggcgggtagcggcgttgggtaggtttttttagtcgggttgataggtcgttttgatttagttattagatttcgtttgcgttttggtagcgtcgattttagggtaatttcgttgtagtggttaagtcgggggcggaattggtttatatttttgaatcgagtaagtttaggagtaggtgtatcggcggcgttgtgaagtagtatttatgataggtaggttgggcgtcgttatttttaaattttcgagggaggattagtcggtttaggttggtattggagttgtagtattatttgtagattaaggagtttttttttgggaggttggagttgtagatgtagtgaaggtataggtttagtgacgttaaaggtgcgtaggcgtattggtgtgtaacggattggtttggttttattcgcgtggtttggttttattcgcgaggttttgcggtggttgtttggcgtggtagtgatcgtttggtttggtatttttggtttagcggtttttttttcgtagattggaaatcgcgggttattttgttgggaggttgtggtcgaggtagtagttcgttattgatggttttttggggtggagaaaagcggggaggggttggggggttttcgaagtcggtagtttacgttacgaggaagatttttagtgttgggagttaggaggattagtggtatttggattattcgggggattagtggtttttgggttttttttatagttggtggaagaatagcgtcggtagcgagagtaagtacggtgagggcgttttagattagttttagtacgatgttcgtttggaagattttggcgagttttatagagttgttcggtcgggcgacgtttttggggtggagtacgttttggtttttggagatattggcgtggataagagggataggaagaagaggtaatggttaggtgaaggatgcgggcgcgtcgttttgttagggatattggttttttggtgtttataggttttacggtattcgggatggggaaacgttagaggggttaggggtttaggttttttaatgagatgggattaaatataaatgattattattattgtaaaagtgttcgtttattttataggagttttttttaaaaatattgtattttttaattgtgtttatttatttttttaatttatttattaaatataagttgaatatttattgtatagtagatatattttattgtcgtttaggttttttttatttttaagaattttatgttggtcgggttcggtggtttatgtttgtaattttagtattttgggaggtcgaggagggtagattacgaggttagaagttcgagattagtttgattaatatggtgaaatttcgtttgttacgtttttgttttagtttagatttagttaagatttttatgataaattattttttaggttttcggggtttagtttaaataatgttgtagaaagagacgagttttttttttttattgttattagatttgtatgttgaggattttttttttagatcgtggaatgttttatattatttttttttagatttgtggtaggaagtttttattagaattttgagttttaagtatgttagttggatttaatagagttaagttttatttatgatttatgaatatttatgtataaaatgagagttttggtagggtgtagtggtttatgtttgtaattttagtaatttgggagtttaaggtgggcggattacgaggttaggtgattgagagtattttggttaatacggtgaaatttcgttattattaaaaaatataaaaaaaaatagtcgggcgtggtggtgggcgtttgtagttttagttatttaggaggttaaggtaggagaatggtatgaatttaggaggcggagtttgtagtgagtcgagattacgttattgtattttagtttgggtgatagagtaagatttagtttaaaataaataaaatttgttttagtagtaaatatatattaaaattggaat

SEQ ID NO: 82 - DNA, 2206 bp, Artificial Sequence
  chemically treated genomic DNA (Homo sapiens)
gggtattttttgggatggtaagtggtattagcgttgtgagatggttttttttttgtcgttaggcgttaggaggtttgttcgggtttgtatgtgtttgggtttggtaggtggggaggcggtatttagggtagttttcgtattggaagttttaggaatttggatttaggttgaaggtttttgttttagagtttcggattgttgagtttggaatagttttttttagatatagtgtggcgcgggagtagttgtatgagggtttacgtattttgtatatattagtagtttattcgattttgtttttggttatgcgaaacgtatgtttattcgattttcgattttgtttttggttatgtaggtttcgtttgggttgtgataggaggttcggcgtttttaggtatttggtaggttttttcgattttttttttgagcgataggaatgggaagtgagtaaatttaagtagaattaggaggttttttttagaggagtttggcggaattcggttttggttgtgtgtcgagtggcggggtatttatagggagatgagttagtgtttattttttgttttagttttttcgtggtcgtttttttttttagaaggggttggtttaggttggtgttttcgtggtttttggagtatatttgttgtcgttttttttggtttttggcgatagtaggtttttcgtattttatttgttttttagttagtatggttttatatagaatacggtcgtagataatttttttgtgttttgtatagcgaattgttattttgcgtgggttttattgttaggttagggaggtaggagttgtttttattttttgttcgggagttgtcgtttgtttttcggatgagttaggaataaatgcgttaatattgggtggtcgttttcgttatttttgcgtacgggttttgtggggagagttaggtagtgggtggcgtgggataggtgatgtttatgtttagtatttaggagatttgtatggtagtttttaagatgggtataagcgattataaggagggatgtacgtgttttatttttttatttattacgggattaggttgaggtcgtttagggagtgtatgggagggttgcgttcggcgtatttgtagagattttttgaagaggggttttggttgttttttattggggtaggtgcgggtttaggttttcgatatcgtgacggtgttgtgggattttgatggattttattcggggagtttaggtttgttttacggtaaggtggttacgtattgtttttgtagttttgagtataggttttatacgggatttgaggtttgggttttatgatatttgggttatgtgtttttttggtgttttttttttggggatgaaattatatttataggtaaaggtttgggagtggagggagatagtaggagataaagtaaggggacgaggattttggtagttataaaggtagcgggagggttttggaggtttttgttgggtagcgtagttaggaaagggtttattaggtgggagaggtaggcgtttggtgagtgttgagatttgtattacgagaagggttgggtttttaaggtatgtatggggtttgggagtggagggagtgtgagcgggtgttaggacggggtttggggcgagcgggtgttaggacgggtttgggagcggagggagtgcgagcgggtgttaggacggggtttgggagtggagggagcgcgagcgggtgttaggacggggtttgggagtggagggagcgagagcgggtgttaggacggggtttgggagtggagggagcgcgagcgggtgttaggacggggtttgggagtggagggagcgcgagcgggtgttaggacggggtttgggagtggagggagcgagagcgggtgttaggacggggtttgggagtggagggagcgcgagcgggtgttaggacggggtttgggagtggagggagcgcgagcgggtgttaggacggggtttgggagtggagggagcgcgagcgggtgttaggacggggtttgggagtggagggagcgcgagcgggtgttaggacgggtttgggagtggagggagcgcgagcgggtgttaggacgggtttgggagtggagggagcgcgagcgggtgttaggacgggtttgggagtggagggagcgcgagcgggtgttaggacggggtttgggagtggagggagcgcgagcgggtgttaggacggggtttggga

SEQ ID NO: 83 - DNA, 2206 bp, Artificial Sequence
  chemically treated genomic DNA (Homo sapiens)
ttttagatttcgttttaatattcgttcgcgttttttttatttttagatttcgttttaatattcgttcgcgttttttttatttttagattcgttttaatattcgttcgcgttttttttatttttagattcgttttaatattcgttcgcgttttttttatttttagattcgttttaatattcgttcgcgttttttttatttttagatttcgttttaatattcgttcgcgttttttttatttttagatttcgttttaatattcgttcgcgttttttttatttttagatttcgttttgatattcgttcgcgttttttttatttttagatttcgttttgatattcgttttcgttttttttatttttagatttcgttttaatattcgttcgcgttttttttatttttagatttcgttttaatattcgttcgcgttttttttatttttagatttcgttttaatattcgttttcgttttttttatttttaggtttcgttttaatattcgttcgcgttttttttatttttagatttcgttttaatattcgttcgtatttttttcgtttttaggttcgttttaatattcgttcgttttagatttcgttttaatattcgtttatattttttttatttttaggttttatgtatgttttgggagtttagtttttttcgtggtgtagattttagtatttattaggcgtttgttttttttatttagtgggtttttttttgattgcgttgtttaataggagtttttagggttttttcgttgtttttgtggttgttagagttttcgtttttttgttttgttttttgttgtttttttttatttttaaatttttatttatgggtgtgattttatttttaggagggaagtattagggaagtatatagtttaagtgttatggagtttaggttttaggtttcgtatggagtttgtgtttaggattgtagaggtagtgcgtggttattttgtcgtggagtaggtttgggtttttcgggtgaggtttattaaagttttatagtatcgttacggtgtcggggatttgggttcgtatttattttagtgggaggtagttagggtttttttttaggggatttttgtagatgcgtcgagcgtagtttttttatgtattttttggacggttttaatttgatttcgtggtgggtggggagatgagatacgtatatttttttttatgatcgtttgtatttattttaggagttgttatgtaggttttttgagtattgggtatgggtattatttgttttacgttatttattgtttggttttttttatagggttcgtgcgtaggagtggcgagggcggttatttagtgttgacgtatttgtttttgatttattcgaaagatagacgatagttttcgggtagggggtgggggtagtttttgtttttttaatttggtagtggggtttacgtagagtggtagttcgttatgtaggatataggagggttgtttgcggtcgtgttttgtgtggagttatgttggttgggggataggtggagtacggaaggtttgttgtcgttagaggttagggaaggcggtagtaggtatgttttaggggttacggaggtattagtttgggttagttttttttgaggaaggaggcgattacggggagattgaggtaagagataggtattggtttatttttttgtgggtgtttcgttattcggtatatagttaggatcgggtttcgttaggtttttttgaggagagttttttaattttatttggatttgtttattttttatttttgtcgtttagggagaaggtcgggaaagtttgttaggtgtttgagggcgtcgagttttttgttatagtttaggcggaatttgtatgattaggaataaggtcggaggtcggatgggtatgcgtttcgtatgattagggataaggtcggatgggttgttgatgtgtgtagagtacgtgggtttttatgtagttgttttcgcgttatattgtgtttaggaggagttgttttaagtttagtaattcggaattttagagtaaaggtttttagtttagatttaagtttttagagtttttaatgcgggggttgttttgggtgtcgtttttttatttgttaagtttaggtatatgtagattcgagtaggttttttgacgtttgacggtaggaaggaaattattttatagcgttggtgttatttgttattttagggaatgttt

SEQ ID NO: 84 - DNA, 2170 bp, Artificial Sequence
  chemically treated genomic DNA (Homo sapiens)
gtgatttttttttttaggatttagtagtattttatcgcgttatagtagttagtatttttaaagtatatattttaatatttttcggtcgtagtatatttaattttttcgtcggggcgtgggggttttttttttttcgagtatagttttcggtttttcgattttttttgttttattttttcgttttttaagtatattgtgtttatttttttaggtagtttttttagcggtcgggtagtagtagggtttcgagttcgtttttttcggggcggttatacgtgtttattttttggggttggggatcgtttttttcgtttggttgttgattggtgtttttttttattttatttttttcgtcgttttttagtttttattttatttcgttttagtttaattagttttatcgtttttttttttcggagaaaaaagttattttagagttttttgggcgtcgttttcggttggaataaaagcgttaagaaataggtggaaagtattttatttttttaggttttatatttttagggtggatagttcgtttttgtttcggttttgttttcggtattaataataattgaatttttatacgtgtacgtttttgtttttagttcgatcgaaaggattatttcgcgggttttttaaaaggacgcgattatttaggttaagtgggggtgggagagtttttggtcgtttttttttgggaaagtgttttaattttttagttttaaagttttggagggcggagggcgtttcgtgagagttttcgggggtgcggttcgcgttttttgggttttgcggatttgggttcgggggcgcgcgtttcgtttttttttttttttggcggtgtagttgttcgggcgggggtggggcgggggtcggggttcgcgtgggattaattaggatcggggcgggagtcgatcgcggtcggcggggagggttagtttcgttttggcgggcgggcgcgtggtaggggttttcggaggtttcgagttttcgggaggcgtttcggttaatttcgggtcggtggggatcgggtttgggcgcggggttttgaaggtgtggaaggaaagtttgggatttcgttatttttttatagcgttttttttttcgtaatatttagtttttttatcgcggggttcgggagtttttggagttgatttcgttattattattttttcgggcgagcgcggaggacgggttggttattttggttaggtcggaggtgttttttagttcggggttttgtgataattgggtcgaaattcgagggttttggagcgcggcgggtggcgggagtttgcggagcgcggcgtattcggcggttaggtatcggttagtttagcggtagtttttttttttttatttttatttttatttttggaaggagttgagaattagtcgattggttggtaggttgaattgtttttttttttatggtaatatgtgtcgtgattttttattttttgtttttggataaaggtgaatggtaattgcgttggttagtttttgttttttgttttgcggatgggttcgtcgacgtagtaattaaaattagagttatttttttggaagagtaaatcgttgttgttgtttttttagttttacggattttattttgtgttattttcgggttgattttaattcgtttattttagagttttttgttttatttttatttttagatttagtcgtgtttgttgaaatattagttgttttttttgtgaatgaagtgtgggaatttgttttcgtcgtagttaatgaaattaggaaaataaaaagattaaaagggttggggatgggagaatgaagaggaatgtagatagatagtttagggttatttattggtttttggcgatttttagttttttaagttgattaaaataatgtgaggaaatgtgggtttttttattttttaggaagaggtaataacgggtattttacgtggcgttatagcgtttgtttttaaagtttgaacgtgaatgtagtaagtataattttattaatgaaaatattttttagataattgttaatattgacgaaagaagagaaatagagatacggaagttaaagagttgggaattttaaaggttaaaggatgttttttagttattttgatgttttgtgtttttttttagttggtataaaatcgtgagtagtttaattatattttgta

SEQ ID NO: 85 - DNA, 2170 bp, Artificial Sequence
  chemically treated genomic DNA (Homo sapiens)
tgtaggatataattaaattatttacgattttgtattaattgaaagaaaatataggatattagagtaattgagaaatattttttgatttttaggatttttaattttttagttttcgtgtttttgttttttttttttcgttaatattaatagttgtttaaagaatatttttattaataaaattatgtttgttatatttacgtttaaattttgaaaataaacgttgtggcgttacgtaaaatgttcgttattatttttttttaaaaagtggagaagtttatatttttttatattgttttaattagtttaaggaattaagaatcgttaaaagttagtgagtggttttagattatttgtttatatttttttttatttttttatttttaatttttttgatttttttatttttttgattttattaattgcgacgagagtaagtttttatattttatttatagaagaagtaattgatattttagtaaatacgattaaatttaaaaataaaggtgaggtaaagagttttgaaataaacgagttaaaattaattcgaaaatggtataaagtaagattcgtggggttggggaggtaataataacgatttgtttttttaaaagagtggttttaattttgattattgcgtcggcgaatttattcgtagaatagaaaataaaaattgattaacgtagttgttatttatttttgtttaaaggtaaaaggtgaaaagttacgatatatattgttatagaagagaaggtaatttaatttgttaattaatcgattaatttttagttttttttaaaaataaaaataaaaataggagaaagggggttgtcgttgggttggtcgatgtttggtcgtcgagtgcgtcgcgtttcgtaagttttcgttattcgtcgcgttttaggattttcgggtttcggtttagttattataaagtttcgggttggaaaatattttcggtttggttagaatggttagttcgtttttcgcgttcgttcggggggataatggtggcgagattaattttaagggttttcgagtttcgcgataaagaggttggatattacgggaggaaggacgttgtggaagaataacggagttttaaattttttttttatatttttagagtttcgcgtttaggttcggtttttatcggttcgaagttggtcggagcgtttttcgggagttcggggttttcgggagtttttgttacgcgttcgttcgttagagcggggttagtttttttcgtcggtcgcggtcgattttcgtttcggttttagttaattttacgcgggtttcggttttcgttttattttcgttcggatagttgtatcgttagggagggggaggggcggggcgcgcgttttcgggtttagattcgtaggatttagggggcgcgggtcgtattttcgagaatttttacgaggcgtttttcgttttttaggattttgggattggggagttgaagtatttttttaagggaggacggttaggagtttttttatttttatttggtttgagtggtcgcgtttttttaaagggttcgcggggtggttttttcggtcgggttagagatagaaacgtgtacgtgtgggagtttagttattattgatgtcgagggtagagtcggagtaggagcgggttgtttattttagaaatatgaagtttagagaagtgaagtgttttttatttgttttttaacgtttttattttagtcgagaacggcgtttaaggagttttgaagtggttttttttttcgagggaagaaggcggtggggttgattgagttggaacgaagtaggatggaggttggagagcggcgggaagggtggggtagggggaggtattaattagtagttaagcgggaagagcgatttttaattttagggaatggatacgtgtgatcgtttcggagaagacgggttcggaattttgttattgttcggtcgttgaaagagttgtttggaagagtgagtataatgtgtttggaaggcggggggatggggtagaggaaatcgggaagtcggggattgtgttcggaggggaggagatttttacgtttcggcggagggattgaatgtgttacggtcgaagggtgttggagtgtgtgttttagaaatgttaattgttgtagcgcggtggagtattgttaaattttaagaaaaaaaattat

SEQ ID NO: 86 - DNA, 2455 bp, Artificial Sequence
  chemically treated genomic DNA (Homo sapiens)
ggattttttatttcggttgtagtttttcgcgtagtgagaaggtagcggtttttgagagtttagtagtgttttgggagtttgtagaacgtaggggcggatttcgcgtcgtattggtcgttaaggggcggtcgcggagggaaggggtgggtcggtgggtttgatagcgggtttgcgtaggcggtagcgtttgttttttttagtttttcgtttcgcgttatgggcgggtttcgggttttgttggtcgtattttgggcgttggaagtcgtcgggatcgtcgcgtttcgtatcggagtttttaatatttagagtttcggtgatagtaaagtgtcggatttcgtttgcggtagtattatcgcgaaggtggggttcgggtcggggcggggcggcgtttaggggtgttgatcgcgttgattttcgtattcgtcgtttttttttagattttggttggttatgatttcgcgttggtgtaggaggtgcgagatttagattttagcgtcgtgttcgcgtttatggagtagattaataggtgtggtgggtagggtttttcgtcgcgatttttcgtcgggatttcgtttcggcgcggcgtttcgattttgagcgggtttttgtttttatagcgtgttcgagtacgagtatagttttgtgagtagttagtttttgggtcgggattagtataaggagatgtatttgttcgtgtataggtgaggggcgggtcgtagggaggggcgcgcggggtcgtaggtcgggggtttagcgggttttttttattttttaggaaagacgcggtgtcggtcgtggatatttatttgtatttagatttcgaggacgtttttagtcgcgagtttttcgtggttaagttttcggttttcggtatcggtgagcgggtttcgttttttttttttcgtcgagttttgacgtttttattttttttcgtagtagtatagaatttggtgttgatttcgttgtacgcggcgtcgtattaagtcgtggcggagatcgacgcgttttacgacgtgtatttggacgtgatcgataagtggggtatcgacgtaagtttatttttcggtttcggggtttttgtaggcgcgtttcgggggtttggtttatgagggcgggatttcgacggtttttgcggcggtttagatacggtttcgcggcgttcgtaggatatgttgtttttgggcgattttaacgtcgattgtagttatgtgcgggcgtaggattgggtcgttattcgtttgaggagtagtgaggtttttaagtggtttatttttgatagcgtcgatattacggtgggtaatttagattgcgtttacgatcgtattgtggtttgtggcgttcgtttgcgtcggagtttgaagttttagtcggttatcgtgtacgatttttaggaggaattcggtttggattagatttaggcgagtgggtcgtggggcggtgttggttttgggtttttatcgttcgggcgtacgtaggtagtagggagggtttagcgtttaaggtagggttattttagttttttttttgtattagggttcgtttttaaggattttggagagttcggtttattttatgtggagttttgggtaggtagggtattttgttttttttttaaagggttaatggtgatattttttgtttcggtttttgtttttgttttatcgtaggtagtagtaggggtgggtatttaggttttatcggttttttttatttttgtgggtggggtgtattttttttttgaggtttattttgtttttataggtttttgttattagcgattattttttagtggaggtgatttttaagttttatcgatgattcgaggtttggttggggtatgttatttgtagattttggttttgaggaatggtttaatagtggtttttttagggtggtagttattttttagtgaggttttaaggtagagtcggttgggcgtggattaggggttatggatacgtgatgtgttgttttgtattttcgttttttatttgtgggacgggttgtatttagcgattttatggggtgttgtgagttttatgaggggtgtagggggtattgttcggtagatgtttgtttaataaatgagttgttttcggtcgggttttatagtttggtttttaggtttttgtttttttttaggatttagttttagttttttaggggtagttatggtttgggttgtttattttatgttttggtgggacgtggttgttttcggagtttgttggttttagaaggtagtttagggatgttttttgtttattttttgtggaaattataaacgtttttaggagtttgtattgtgagtatagttgggatagggatggcgttaatatattagttttttgggttttcggggtttttagaatagttttttttaggtttatttcgtagtttttattttagggttttgtaggggtttttaggtatttgtttgttttaagagttcggt

SEQ ID NO: 87 - DNA, 2455 bp, Artificial Sequence
  chemically treated genomic DNA (Homo sapiens)
atcgggtttttgagatagataagtgtttgggggtttttgtagggttttggaatgggggttgcggggtgggtttggggagagttgttttgagagtttcgagggtttaggaggttggtgtgttggcgttatttttgttttagttgtgtttatagtataggtttttgggagcgtttgtagtttttatagaggatgagtaaggagtatttttgagttgttttttggggttagtaggtttcgggggtagttacgttttattaggatatggggtgggtagtttaggttatggttgtttttaaggagttgaggttgggttttgaggaaggatagaggtttgggagttaagttgtggggttcgatcgggagtagtttatttattgagtagatatttgtcgggtagtgttttttgtattttttatggggtttataatattttatgaggtcgttggatgtagttcgttttatagatggggaacggaggtatagagtagtatattacgtgtttatggtttttggtttacgtttagtcgattttgttttggggttttattgaagggtggttgttattttgaaggggttattgttgggttattttttagagttagggtttgtaggtggtatgttttagttaggtttcgagttatcggtggaatttgagggttatttttattggaaagtggtcgttgatggtaagagtttgtggggatagagtgaattttaggggaaaagtgtattttatttatagggatgggaggggtcggtgaggtttgggtgtttatttttgttgttgtttgcggtggggtaggggtaggggtcggggtagagggtgttattattggttttttgagggaaaggtaaggtattttgtttgtttagagttttatatggggtgggtcgggttttttagggtttttggaaacgagttttggtgtagggaggaagttgaggtggttttgttttgggcgttggattttttttgttgtttgcgtgcgttcgggcggtggggatttaagattagtatcgttttacggtttattcgtttgagtttggtttaggtcgaattttttttggaagtcgtgtacggtggtcgattggggttttaggtttcggcgtaggcgggcgttataggttataatgcggtcgtaggcgtagtttgagttgtttatcgtggtgtcggcgttgttagggatgagttatttgaagattttattgttttttagacggatggcggtttagttttgcgttcgtatatagttgtagtcggcgttgaagtcgtttaggaatagtatgttttgcgggcgtcgcggagtcgtgtttgagtcgtcgtaggagtcgtcgaggtttcgtttttatgaattagattttcggggcgcgtttgtagggatttcgggatcgaggggtgggtttacgtcggtgttttatttgtcgattacgtttaggtatacgtcgtagagcgcgtcgattttcgttacggtttgatgcggcgtcgcgtgtagcgggattagtattaggttttgtgttgttgcgggaaggggtgggggcgttagagttcggcgggaggggaggggcggggttcgtttatcggtgtcgggggtcgagaatttgattacgaagggttcgcggttgaagacgttttcggggtttgggtataggtaggtgtttacgatcgatatcgcgttttttttaggagatggggaggattcgttgagttttcgatttgcggtttcgcgcgtttttttttgcggttcgttttttatttgtatacgaataggtatatttttttgtattggtttcggtttaggggttggttgtttataaagttgtattcgtgttcggatacgttgtggagataggggttcgtttagggtcggggcgtcgcgtcggggcgagatttcggcggggggtcgcgacgaggggttttgtttattatatttgttgatttgttttatgagcgcggatacggcgttgaggtttgggtttcgtattttttgtattagcgcgaggttatagttagttaggatttggggaggagcggcgggtgcgggggttagcgcggttagtatttttaaacgtcgtttcgtttcggttcgggttttattttcgcgatgatgttgtcgtaagcggggttcgatattttgttgttatcgaagttttgaatgttgaaggtttcgatgcgaagcgcggcggtttcggcggtttttagcgtttagagtgcggttagtagagttcggggttcgtttatggcgcggagcgagaggttgggagggatagacgttgtcgtttacgtagattcgttgttagatttatcgatttatttttttttttcgcggtcgttttttgacggttagtgcgacgcggaattcgtttttgcgttttgtaggtttttagggtattgttgggtttttagggatcgttgtttttttattgcgcgggaagttgtagtcggaatggagggttt

SEQ ID NO: 88 - DNA, 2377 bp, Artificial Sequence
  chemically treated genomic DNA (Homo sapiens)
ttttggttgaagttgcggggagggggagtgaagtagtttggattgaataggatatattgaaggggaagtagtaagagtggtgagtggtattatttgatgtttaagtttagtaggatttgtttttttttttgatttgggtgaattttgattttaatgatgcgtaatggttagggagagagaaatttttgagagagggtagggatagggagaagtatttgagtttatttcgggttatttattttttttagtttatttttttatttttttttttttatatatatttttttatttagttttattcgtgtaaatgtaaatgtttgtagatgggggttagattttttaatagtcggagttatagttttagttagaagtttttttatatattggtttaggaagggttagatttgggttataatttgggaggaaagagagatggttagaggagagtttagtttttttttttaaggtaagtttttttagaattttttttacggagagtattgagggttgaggatgggtttggtaagaagaaataaatttttattttttttttatgaagattaaaaattaaattaatttttattttattgagttatttagttttttttacgtttgggaagttgatttggaggtggggaaggtagagatagtgacgtgtagtatattttcgtttttggttttttattaagatgttggtggtgtgttatagaggagagggagtgtgtgtgattttttatatttagggtgggcgaggggcgaggatgttttaaaggtttattttttatagagtttgggggttgatgtttttttaataaggggagttgataaggtagaggttacgttgttgttttgtggatagtttagggacgtggtgaaatgatagttgttgagagagagaggagcgggaggaggagaagggcgtattttttttggagggggaggtttagttaaattggagtttgagggaattttgggatttaaaaagttttggttttaggttggtcgcggtggttcgtatttgtaattttagtattttgggaggtcgaggtcggcggattacgaggttaggagttcgatattagtttgattagtatggtgaaattttgtttttattaaaaatataaaattagtcgggcgtggtggcgcgtgattgtaattttagttatttaggaggttgaggtaggagaatcgtttgaagaggtagaggttgtagtgtgttaagttcgggttattgtattttagtttggtaatagagcgagatttcgttttaaaaaagaaaaaaaaaaaagtttttttttttagtttttttaattttttttagacggggtttttagagtaggaaggtgaagagggaagtaagtttttttttgagttagggaggggttagaagatttaattaggtttggttttgtgggttttttggggtgtgtgtgtgtgtttttttttatttttttttgtgtgattttttttaagggaaaggatatttgcgttttgtattgggggtaggaagattggtttttatgatgatgaggaggagataaatatttgttgtttaggttataggttttttagagttatttggttttttttttttttttttttttagtttagggtttgggaagtttggttgtgtttgtttagtgttaattttgatttttttttgttgttattttttttttagattggtatttttgttgggaggggtcgggtaatcggtttcgtttttgtaagattagagagaaggtattcgttttagtataggagacgcggtcgtcgtagaaataagggtttttgttttaacggaataagcgtagtttatagttcggaaaagggtgtggtcggtcgaggagtgcgggggagtgtgcgtcgcgggtattgtagtagtcgtattattttttttcgtagtttttttttcgtttagtagtcgtttttgtcgcgttgtagtttggcggttggaggtttgaaggtggttgttcgagggtcgtttaggggtcggggttgggttttagcgggtattcggggataaaagcgagaaaagagagaatcgtatggttttaagtaggtaaaaagtttcgaggaggatgggaaagattagggaaatttttgagaggtaacgggattaggatttttaggagtagtaaagtcgcgagtggtattaaaagtaagagggacgtttaagatggtttggttaggagggagagtttcggttgagacggggtttttagatgttattattgttgttgtttaagtagaggaagaagttttgattttgtggaaggatttagtttgggtatgcgaaagggtgggtggggagagtgagtagtcggttttaagagtggcgcgtttagtaggtaggcggttagcggggagagagggg

SEQ ID NO: 89 - DNA, 2377 bp, Artificial Sequence
  chemically treated genomic DNA (Homo sapiens)
ttttttttttttcgttagtcgtttgtttgttggacgcgttatttttggaatcgattgtttattttttttatttattttttcgtatgtttagattggatttttttatagaattaggatttttttttttatttgggtaatagtagtaataatatttggggatttcgttttagtcgaagtttttttttttagttaagttattttgaacgttttttttgtttttggtgttattcgcggttttgttgtttttggaaattttggtttcgttattttttaaaggtttttttagttttttttatttttttcgagattttttatttatttaaagttatacggtttttttttttttcgtttttattttcgggtattcgttaggatttagtttcggtttttggacgattttcgggtagttatttttaagtttttagtcgttagattgtagcgcggtagaggcggttgttggacggagggagggttacgggaggaggtggtgcggttgttgtagtgttcgcggcgtatattttttcgtatttttcggtcggttatattttttttcggattgtgggttgcgtttgtttcgttggggtagagatttttatttttgcggcggtcgcgttttttgtgttgaggcggatgttttttttttagttttgtagaggcgaagtcggttattcggttttttttagtagaggtgttagtttagggggagaatggtagtagagaggaattaaaattgatattagatagatatagttaagttttttaggttttggattggaaaggggaggagaaagagggttaaatggttttaggggatttgtagtttaggtagtaagtgtttgttttttttttattattatggaaattaatttttttatttttaatataaagcgtaggtgtttttttttttaaaaggagttatatagagaaagatagaggaaaatatatatatatattttaaaaaatttataaagttaggtttaattaggttttttggtttttttttgatttaaggaaggatttgtttttttttttatttttttgttttagaagtttcgtttgaggggagttgagaaggttggaaaaggggattttttttttttttttttttgagacggagtttcgttttgttgttaagttggagtgtagtggttcgaatttggtatattgtaatttttgtttttttaagcgatttttttgttttagttttttgggtagttgggattatagttacgcgttattacgttcggttaattttgtatttttagtagagatagggttttattatgttggttaggttggtgtcgaatttttgatttcgtgattcgtcggtttcggttttttaaagtgttgggattatagatgcgagttatcgcggttagtttggaattaggattttttaaattttaggatttttttaaattttaatttgattggatttttttttttagaaagaatgcgtttttttttttttttcgttttttttttttttagtagttgttattttattacgtttttgagttatttatagggtaatagcgtgatttttattttgttagttttttttattagagagatattagtttttaaattttgtgaggaatgaatttttggggtattttcgtttttcgtttattttgagtgtgaggagttatatatatttttttttttttgtggtatattattagtattttagtaggaaattagaggcgagggtgtgttgtacgttattgtttttgttttttttatttttaggttagttttttagacgtggaaaaggttgaatggtttaataaggtgaggattgatttgatttttagtttttatgaggggagaatgggaatttgtttttttttgttagatttatttttaatttttagtgtttttcgtggggaggattttgaaggaatttgttttgagagggaagattggatttttttttgattatttttttttttttttagattgtggtttaggtttggttttttttgggttagtatatggagaagtttttggttgaaattgtggtttcggttgttaggggatttaatttttatttgtaaatatttatatttatacgagtggaattgggtgaaaaggtatgtgtggaggagggaaagtgaggaggtaggttagggagggtgagtggttcggagtagatttaggtatttttttttatttttgtttttttttaggaatttttttttttttagttattgcgtattattggagttaaggtttatttaggttagagaaaagagtagattttgttggatttgaatattaggtaatattatttattatttttattgttttttttttaatgtgttttgtttagtttaggttattttatttttttttttcgtaattttagttaagg

SEQ ID NO: 90 - DNA, 3687 bp, Artificial Sequence
  chemically treated genomic DNA (Homo sapiens)
gtaagttttttttttcggcgtataggtacgtagttataggttaagttgcgacgcgagtttcgcgcgcgggattttcgtaaaaggttcgttcgatgcgttgggcgggaatcgagttcgggttaattgtttggaaggtaattatgtttattattatattattaacgtcgtacggcgcgggtagtttcgtcgcgtcggttcggggtttttattagcgcgtcgtcgacgttcggggtaggtcggtttcgacgttcggttcgttcgttcgttcgtagtttcgcgttgtcgcggtttttttaaaggtcgtttcgcgttttatcggtgtaaggttagcgcggttgattcgttacgttcgtttgtttttgggggcgttttcgtttattcgtcgtttcgggtttttagagtttttttttaataggtgttcgggggggaaacggtcggcgtcggtagggtttttatttttacgttttttatcgggcgtagggtttcgtgtgtcgtagaaagtttttttcgataattattttgagtcggtagttcgttgggcgtcgtgtagggttagaggaggtttttcggttgtcgttattaagtcgcggacgagaagaaaagataggaggttaaggaggtttagaaggttaaagggttaggtaggttaggttcgagatggtattttgcgattagttggagggcggaggaaggagaaggagggtttataggttgggttcgaggcggcggtttaaaaagtacggttgttttttcgtcggggaatcgaatttcggtttttcgcgtgataggcggggatatttattattatattaacgaggacgacggcgacggtcgtcgggacgttagattttatttcgatcgcggacgtttagttttgttttgattttttttttcgacggtaggggtcgggcgcgtgttcgttttttattcgtcgttcgtcgttcgttattcgttatacgttattcgttatttgttattcgtttttcgttatcgttggtacgatttatttcgatatttaataaagtattttgcgatttcgttgggattcggagtcggagtcggatttcgataggtatcggagcggcgtggaattttttcgcgcgttttgtttgttgtttttaacgcggggatcgcgtcggggtaggaggaggcgcgggcgaaatagttaggtcgttgtttttaggacgcggtgggcgtacgttttgcggggttcggcgagcggaggcgcgggggttggggcgtgcgtcggcggcggtcggttcgacgcggattttttgggttcggggtggggacgcgggggcgtttacgttaacgttagtcggtttcgtttatttggcgttcgtttttttcgcgcggttcgtcggttgcgtatcgaatttagataggcgtcggttaagggcgtaggcgttcgcgtcgggttttagttatgttagcggcgaagcgtttcggcgcgtcgttaggatggtcgagcggtttaaggcgttgcgtttaggtcgtagttttttttggaggcgtgggttcgaattttatttttgataagtcgattttttggttcgttcgtcggagggtaacgtttatggtaattttggagtatttttggtcgttttttgttttgagtttttgttcgttttttagattttagtttttttgaagtaagtttttaaaacgtcgtcgttttttaggtacgttcgttttttttgtttattcgtcggttgtcgtagaaatagtttaggattatgcgttagcgttcgcgattttttattaattgtttttcggatagacgttttttttattattttatacgtttttttttttggttttatatatagcgagcgatcgcgattattttttacgtttttttttgtttatttttttcgttcgttttttttttattcgtttaaatagatatagtttagattttttttttatttttttttttttttttttttttttatcggttttcgtttatcgtttatcgttttgaatcgtcgttgcgttgtttagaggcgttttggtttgaatagttcgttcggttttattttttaatttttgatcgttgagtagtagcgagcgattcgttcgtggagtcgtatatacgttttttattagaggtacgttatttaatattttgttttttttttcgatttttcggatttcggtcgcgtattttattttgtcgatattttagttaggtcgtcgattttatttcgttatttgtgtttttttttcgttaatatttgtttgtcggtttatttgtagttcggacgtttgtcggttagaggtagcgggaattttgtatatagtcgggtaggcgagtttaaattcggaaagatagtttaagaggaattacgagcggaagttttagattttcgttattcgtttataaacgtttggtttcgtcgggattagttttgcgttatagcgtatttttacgcgggaagtcgcggtttgggtcgttttagttatatttagcgcgttttttttagggttagttagttgcggttttgtcgaagcgttttttcgtttttttttcgcgttttagtttttttattagtttagggggtcggattttaagtgcgagtcggtggcgtgggttagagcgtaggagcgaggcgtttacggatttggtttgcgtttttgagtcgtacgttacggttgcgagattcgttttttatcgtcgttttcgttcgttgatatatttatttcgttttttatttgttggtgatataagtgagaaggttggttttacggtggtgaaaaaaaaaaatattatacgaaagaaagaaagaaagaaagaaagaaagaaagaaagaaagaaagaaagaaagaaagatagaaagaaataataaaaataaaatataaaaattttgggtttgtgtcggggattcgcgtttagtaaggttcgttatagtaaatttgtttatacgggtattcgggcgcgggttacggtcggttttttttttggagatttcggcgggtagtttttcgattttgggcggtagagaaagcgtaagatgggacgagtcggttttttttttttcgtttttttttcgcgtttcgttttaggtttttcgacgtgacgagagtttttttttttgttcgttttatcgggttagtttttcgtggacgttgtaataggacggaggtttacggtaggcggtgattagtgaacggcggttggtggcgagtttcgttgtgttagttttcgttggcgtttgttatcggtgtatgggtggtttagtggtagaattttcgtttgttacgcgggaggttcgggttcgattttcggtttatgtagtacgtttttttattttggtgttgtagtagtattaaggcgtagttgcgttcgtttttgtcgtttttttatattcggggcgcgcgagcgagttcggtatcggttgcgtttttacgcgcgacggttttttgttttttttttcgtgtttttttcgattgatttagggatgagtttatttttcgtatttatatattttggtgataataatttttttagatacgagagcgcgttagatattagaatttggtagttttttggttttgtttttttttattgttttgttatcgtttttgttcgacgtattttattttacggaatatcgttaggtattacgggtttgtagttattcgtattattttttttttttatattttatcgtttcgatttttttt

SEQ ID NO: 91 - DNA, 3687 bp, Artificial Sequence
  chemically treated genomic DNA (Homo sapiens)
gagagaggtcgaggcggtgaaatgtgaagagaaggggtggtgcgagtggttgtaagttcgtggtgtttggcggtgtttcgtgaagtgaaatgcgtcgggtagaggcggtggtagggtaatgaagagaaataggattaggaggttgttaagttttggtgtttggcgcgttttcgtgtttggaggggttgttgttattaaggtgtgtgggtgcggggggtaggtttatttttaagttagtcgagagaggtacggaagaaagggtagagggtcgtcgcgcgtgggagcgtagtcggtgtcggattcgttcgcgcgtttcgagtgtaaggaggcggtagaggcgagcgtagttacgttttggtgttgttgtagtattaaaatgggagggcgtgttgtatgggtcgggaatcgaattcgggtttttcgcgtggtaggcgagaattttattattgaattatttatgtatcgatggtaaacgttaacggaagttggtatagcggaattcgttattagtcgtcgtttattggttatcgtttgtcgtgggttttcgttttattgtagcgtttacgagaggttggttcgatggggcgagtagaaggggaggttttcgttacgtcgagggatttgaggcggggcgcggagggagagcggagggagagaggtcgattcgttttattttgcgttttttttgtcgtttagggtcgagagattgttcgtcggggtttttaggggaaggatcggtcgtggttcgcgttcgaatgttcgtgtgggtagatttgttgtggcgggttttgttgagcgcggattttcggtatagatttagagtttttgtgttttgtttttgttgtttttttttgtttttttttttttttttttttttttttttttttttttttttttttttttttttttttcgtgtggtgttttttttttttattatcgtggggttagtttttttatttgtgttattagtaggtgagaggcgggatgggtgtgttagcgagcgggggcggcgatggggaacgggtttcgtagtcgtggcgtgcggtttagaaacgtagattaggttcgtgggcgtttcgtttttgcgttttgatttacgttatcggttcgtatttggggttcggttttttgggttggtagggaggttggagcgcgagaaaggagcggaggagcgtttcggtagagtcgtagttggttgattttggagaaggcgcgttgggtgtggttgggacggtttaggtcgcggtttttcgcgtggggatgcgttgtggcgtagagttggtttcggcggggttaggcgtttgtgggcgggtgacggggatttagggttttcgttcgtgattttttttgggttgttttttcgggtttggattcgtttgttcggttgtgtgtagggttttcgttgtttttggtcggtaggcgttcgggttgtaggtgggtcggtaggtaggtgttagcgggaagggagtataggtagcgaggtgggatcggcgatttggttagggtgtcggtagaatggaatgcgcggtcggggttcgaggggtcggaggaaaggataggatgttggatggcgtgtttttggtgggagacgtgtgtgcggttttacgagcgagtcgttcgttgttgtttagcggttagaagttggagggtgaaatcgggcgggttgtttaggttaggacgtttttgggtagcgtagcggcgatttaaggcggtgggcggtgggcggaggtcggtgggaggaaggagggaaaaggaggaataggggaagaatttgggttgtgtttgtttgggcgagtgaggagaaggcgggcggaggagataggtagggaagagcgtggaaggtggtcgcggtcgttcgttgtgtgtggggttagggaagagggcgtgtgaggtggtggggagggcgtttgttcgaagggtaattggtagagggtcgcgggcgttggcgtatggttttgggttgtttttgcgatagtcggcgggtgggtaggaagaacggacgtgtttgagaagcggcggcgttttggaggtttgttttaagggggttggagtttggagagcgggtaagggtttaaggtaggaagcggttaaaggtgttttagggttgttatgggcgttgtttttcggcgggcgggttaaaaggtcggtttgttaggagtgggattcgaatttacgtttttaggggagattgcgatttgaacgtagcgttttagatcgttcggttattttgacggcgcgtcggggcgtttcgtcgttggtatggttgggattcggcgcgaacgtttgcgtttttggtcggcgtttgtttgggttcggtgcgtaatcgacggatcgcgcggggggagcgggcgttaagtgaacggagtcggttggcgttggcgtggacgttttcgcgtttttatttcggatttaaagggttcgcgtcgggtcggtcgtcgtcggcgtacgttttagttttcgcgttttcgttcgtcgaatttcgtagggcgtgcgtttatcgcgttttaggagtagcggtttgattgtttcgttcgcgtttttttttgtttcggcgcgattttcgcgttggagatagtaggtagggcgcgcggggaggttttacgtcgtttcggtatttgtcggggttcggtttcggtttcgggttttagcgggatcgtagggtgttttgttgggtgtcggggtaggtcgtgttaacggtggcggggggcgggtggtaggtgacgggtggcgtgtggcgggtggcgggcggcgggcggcgggtggaaggcgagtacgcgttcggtttttgtcgtcgggggaggggattaaggtagggttaggcgttcgcggtcggagtggggtttggcgtttcggcgatcgtcgtcgtcgttttcgttagtatagtggtgagtattttcgtttgttacgcgggagatcggggttcgatttttcgacggggaggtagtcgtgttttttgggtcgtcgtttcggatttagtttgtgggttttttttttttttttttcgttttttagttagtcgtagggtgttatttcgggtttggtttgtttggttttttggttttttgggtttttttggttttttgtttttttttttcgttcgcggtttggtagcggtagtcgggaggttttttttggttttgtacggcgtttaacgagttgtcggtttaaagtggttgtcggaagaggttttttgcgatatacggggttttgcgttcggtgggaagcgtaggagtggggattttgtcggcgtcggtcgtttttttttcgggtatttgttggggaagggttttgggggttcgaggcggcgagtgagcgagagcgtttttagaggtaggcgggcgtaacgggttagtcgcgttggttttgtatcggtggggcgcggggcggtttttggagaggtcgcggtagcgcggagttgcgggcgggcggacggatcgggcgtcggggtcggtttgtttcgggcgtcggcggcgcgttggtgggagtttcgggtcggcgcggcggggttgttcgcgtcgtgcggcgttggtggtatagtggtgagtatagttgttttttaagtagttgattcgggttcgattttcgtttaacgtatcgggcggattttttgcggagatttcgcgcgcggagttcgcgtcgtagtttggtttgtggttgcgtgtttgtgcgtcggggaaggaggtttgt

SEQ ID NO: 92 - DNA, 2409 bp, Artificial Sequence
  chemically treated genomic DNA (Homo sapiens)
taaggtttgggtatttttaggtagtagggataaggtgggttttttttttggttgttaaatttacgttaaagtcgagtttagggattggagtttaagaaatttatcgtttattttttagttcgatcggggatttgtatgtatttttgtcgtgttgttttgagttttttaattttttatattttttttttgttatgtatacgtttttatttaggtttgtaaaagttttagttttttcgtaggggtagggattcgtacgtcggtttagggtttggtacgcggggatgttgaaatagggttaggtttggtttttagtcgatcgttagagttttaaggtttagtaattttttttataaaggtttcgttaagaggcgaggaaataagagtcgggagaggggcgcggaacggcgggcgggacgaacgattagtttcgcgttttcggttagttgcgtcgagttaggggtatcgcggttgttgtgcggttggaaatttaggaatgggaaggttcggggtttgttcggtttcggaggtagttggcgggtcgtttttggcggcgttggagcggttagtggtagtcgggtacgggcgatcgggtcgttcgggtcgtttttagatcgtgattttcgaaaaattttgcgggcggggcgcgttcgcgtcgttttttgtcggaaggtgcgagttagtgcgttcgattgtgggcgggggcggaaagaggcgcgttttaaagtggtaatagatggtttttttatttaataggattaaaaaatttgtttttattcggtcgatcgcggaagtagagtaggcgggcggttaatggggatatgatggggggcggagtcgaggttttcgaagcggaagtgggttgttgttgaggcggcggtatttttttcgaggagtttttttgggcggttgaagaaggagtttttttttcggagtgcgtcggcggtggcgtttgcggatttaattagttttaggttaggtcgagttttgcgggaaagtagcggtaagttagggttttgtagatgcgaggtttaggtagtttcgcggtttatagaggtttcggttcgcgttttttgggggagtcgcgttgcgcggtttgatttagtcgaggttttgtagttcgggatttcgagttagttttggtcgttcgtattgtcgttcgcgcgggcgtatcgagttcggtttggcgcgggtaatagaagttaggaggtttgcgtttgggtttcggtttattttggggggtcgcggttatggggtttagtttttagtttaggaagggaaattgagattttgggaggggtaggaacgtttttaaggttatttggaaagtcgggtaggatgtgttgttagggggaagattcgggtagggtttttgtttttcgttgacgacgttttttttgtgtgttcgcgtcgtcgtttcgttatcgtggggtttgcgagtttgtcggggtgcgtgggtcgcgtggcggggttttttgtaggtcgggaggatttgagtacgggtgcgggtttgatcgtgggggcgtcgaggtcgtagtttaaaatttagtagggtttcgattttcgggcgcgttttcgggtttcggttggtggttggtggaacgtgcgattgtgaggtttgcggtttagttttgtatcgttcgggttttttatcgttttggcgcgtttatagataggtgtatgaagatttttacgattcgaaatagagttgttagtaaatatcgttttttcgtttttgatttatcgagggaagagggaaaaggatagagtttgggtaagtcgttttggtagggattttagtttttgttttttatttgttagtttttatagacgtttataaatttaataattttcgttttgtttttgtattaagtttttgagttagacgtagggttttagttttggagtttggtttagattgtttaattgattggggagattgaggtttagaaaagtgaagtggtttgtttaaggttatatagttagttatttggtagtagatgaggttaagttttatttgtaagatttgggttttgaatttattgattaggagttttgggattattgttaataaaagagatattgaagggaattttttgttatttttttggtgatttgttttttaatggataaggatatattgggtttagttttatttgtgagtttgaggtgaaatagaggtattcgagtagtaagatatattgttggtttttgtattgtttgaatttgagtttttaaaaattttattttaatatatcgtttattgatttttttttgaattattatttttgtaaggattttttgtaaatattgtttttttaatttttatgaaattttaatgttatacgtaaattatttttttttatataatgtatgtatatttgtgttttgtatataaaatgagtaagattt

SEQ ID NO: 93 - DNA, 2409 bp, Artificial Sequence
  chemically treated genomic DNA (Homo sapiens)
aaattttatttattttatgtataaagtatagatgtgtatatattatataaaaagaaatagtttacgtatggtattaagattttatgaagattagaaaaataatgtttataaaaggtttttataaaggtagtaatttaagaaaagattaataaacgatgtgttaaagtaagatttttggaagtttaaatttaggtaatataaaagttagtaatatattttgttattcgaatgtttttattttattttaaatttatagataaaattgaatttaatatgtttttgtttattaaaaagtaaattattaagaaagtaataaaagattttttttaatgttttttttattgatagtggttttaaaatttttggttaatgaatttaaaatttaaattttgtaggtaggatttaattttatttgttgttaaatagttggttatgtgattttgggtagattattttatttttttggattttagtttttttagttagttggatagtttaagttaggttttagagttgagattttacgtttggtttaagaatttggtgtagaaatagaacgaagattattaagtttgtgaacgtttatgggaattgataagtgaaagataaaagttgaaatttttattaaaacggtttgtttaagttttattttttttttttttttttcgatggattaaaggcggaaaagcggtgtttattagtaattttgtttcgggtcgtgagaatttttatatatttgtttataggcgcgttagagcggtgaagggttcgagcggtgtagggttgggtcgtaagttttatagtcgtacgttttattaattattagtcggggttcggaagcgcgttcggaaatcgaggttttattaagttttagattgcgatttcggcgtttttacggttaggttcgtattcgtatttagattttttcgatttataaaaggtttcgttacgcggtttacgtatttcggtaaattcgtaggttttacgatggcggggcggcggcgcgaatatataaaggaggcgtcgttagcggggaataaaaattttgttcgggttttttttttaatagtatattttgttcgattttttaagtgattttgggggcgtttttgttttttttagagttttagtttttttttttaggttaggaattaagttttatggtcgcggttttttagggtgagtcgagatttagacgtagattttttaatttttgttgttcgcgttaagtcgggttcggtgcgttcgcgcggacggtagtgcgagcgattagagttggttcgaggtttcgggttgtaaagtttcggttgggttaagtcgcgtagcgcggtttttttaagaggcgcgggtcgaggtttttgtaggtcgcgaagttgtttaaatttcgtatttgtaaggttttgatttatcgttgttttttcgtaaagttcggtttaatttggagttagttaggttcgtaggcgttatcgtcggcgtatttcggagaagaagttttttttttagtcgtttaggagagtttttcgagaaagatgtcgtcgttttaatagtaatttattttcgtttcggaggtttcggtttcgttttttattatgtttttattggtcgttcgtttattttattttcgcggtcggtcgggtaaggataaattttttaattttattggataagaaaattatttgttattattttaaaacgcgttttttttcgttttcgtttataatcgagcgtattaattcgtatttttcggtaagagacggcgcgggcgcgtttcgttcgtaaggtttttcgggagttacggtttgagggcgattcgggcgattcggtcgttcgtgttcggttgttattgatcgttttaacgtcgttagggacgattcgttagttgttttcggagtcgagtaggtttcgaatttttttatttttagatttttagtcgtataatagtcgcggtgtttttggttcgacgtagttggtcggaggcgcggagttggtcgttcgtttcgttcgtcgtttcgcgtttttttttcggtttttgttttttcgttttttaacgaggtttttgtgaggaaggttgttgggttttgggattttgacgatcggttggaaattaggtttggttttgttttagtattttcgcgtgttaagttttgggtcggcgtgcgggtttttgtttttgcgaggaagttgggatttttgtaggtttgggtggagacgtgtatataatagaggaagagtgtggaggattggaggatttagggtagtacggtagaggtgtatgtaggttttcggtcggattggagaatgggcggtgggttttttgagttttagtttttgagttcgattttgacgtgggtttagtaattaggaaaaaagtttattttgtttttgttgtttgagaatatttagatttta

SEQ ID NO: 94 - DNA, 2356 bp, Artificial Sequence
  chemically treated genomic DNA (Homo sapiens)
taatatatattttttaaggtaattaaagggaatatttatttttgtttgaggaaaaaatattttgtaagttaaaatttttattaatatagtattttattatatgattttttttttttattttaaaataatggggtttaattttttgaagcgtagtttttttagtaataaaggcggataaatttgtttttttttgtaagtagatattttttaaaggtaagaaagggaagattttgttagtttagtttattatagttaatgttttttttattaagtgtttaattgtttcgaaagttagatgttttagaaagttagatgttttatagttgttttggtggtaattattttaagatagcggtattaaaggttttgatttttagtttttttatttaaaaaatggggatattaattattttataataaagttttgatgatataatgagattataaataaaatattttgtgatgtttgatttattatttaattaaaatttttataatggatttatatttttggtttagttattatatattttgttaagtggtttttttttaagaaaaattggggatgggggggttaggggggtgggagagtagtagggagtaggaggtagggaaggaggaaaataagtaaaattagtatatatataagtttttttatttttgattgtttgcgttttttgtgttttttttttttaagtttttttaggtttatgttttgaatttttttttttataaatgaaatataacggatacgaattatagagaattttacggaagatattggagtttaagtttgtagattagttttttgtttataagcggaggcgattggaaaattaagttaaataagcgttggataattttaaatagttaaagaagttttaatgggatagggtttaggtttattaaaggaggtaatattagtaattgacgaaattatagcgacggttgatcgattatgattcgaggtataagacgttaaatttaaggttattaattaacgtgcgtaagaagcggttttaatcgattcgggcgatgttaatcgcgtaattattggtcgtcgcgttattttaggtttaggaatagtttagttcgtaatagggagattttaattagggagaggaggagcggggtaaaggggttgggtgttttttaagtcgttgcgcgggacgtggaagggacgaaagaggtgaggaagagtagtaaattaatttaatatatttatatttttgttgtgtttttaggattacgagaagcgggtagggggcgattttcggttttttttatttcgtaaaggtttttaattgggtttttcggttaattttttagttatcgttattttgaaatttcgcgttttttcgtattttttacgttattttttatttttttgtttcgtttttttttagcgtcgtttgattttggaattatagagaatatttaagaattttaggattagagtttttttcggttttatataatatttaattggttggttgtcggttaagagttcgttttattgcgtttatttagtataataggaattagaagaagatagttgttaattgagtggttgacggttttgtttttcgagttggaggtattttgatttagttgttgggagtttggtacgttgagtcgttcgagaacggtatattttgtagataaagaagcgttttgcgttttttgttttttggaattattttagtttttgtatttttttgttttttatgatttaagtaggtgcgattttttaggggtgttttcgtgtgtaaacgaatatttagataatatttgttattgagtttaattcgttttgtaagtattaggttattttatgtgagcgtttagtacgtgtggaaatttaatagataggtagaatagaacgtttgtagattatttgaataaataaattagtattcgtattagagtcgtagattgtttatatgggcggtgatttattatttgttagtagtgttttgaagaagaaatacggggatatatatgtagtcggttttaagttatatgagtggtaaggttgatatatattggttatattttcgattggtttttttattagttaaaagttttttatgatgttattttacgtacgggattttttatttaattttagttttcgttttttttttattttttatttttttttttcgtgagttagtttttatttattttttttaaaggtaagtttaaatatttaaaaaattattttagaggatacgtttggttatttttaattttaatttgattattttatgtaggaaggttatttttattattagttataaatattttaaaatattgatggagatatatattaatttttagtagaatttttaaa

SEQ ID NO: 95 - DNA, 2356 bp, Artificial Sequence
  chemically treated genomic DNA (Homo sapiens)
tttaaagattttgttaaaaattagtatgtatttttattaatattttgaaatatttataattggtggtaagaatagtttttttatatgggatagttaggttaagattagaaataattaagcgtattttttaagatagttttttaaatgtttaaatttatttttaagggaaataagtgggggttgatttacggaaagaggggatagaaggtagggaaagggcgaaggttagagttaagtgaagaatttcgtacgtagagtgatattatagaggatttttggttggtgaaaagattagtcgggaatatagttaatatatattaattttgttatttatataatttaaaatcgattgtatatgtattttcgtattttttttttaaaatattattaataaataataaattatcgtttatataagtaatttgcgattttaatacgggtgttaatttatttgtttaggtggtttataaacgttttgttttgtttgtttattaaatttttatacgtattaggcgtttatatgggataatttgatgtttataaagcggattaaatttagtggtaaatgttatttgggtattcgtttatatacggagatatttttaaaggatcgtatttgtttgggttataagaaatagaaaaatgtaaaaattaaggtaattttaaaagatagaaaacgtagaacgtttttttatttgtagaatgtatcgttttcggacggtttaacgtattaggtttttagtaattaagttaagatgtttttaattcgagagataggatcgttagttatttagttagtagttatttttttttaatttttattgtattagatgagcgtaatgaggcgggtttttagtcgataattaattaattgagtattgtatggaatcggaagagattttggttttggaatttttgggtattttttatggttttagggttaagcggcgttaagagaaggcgggatagaggaatgggaaatgacgtgaggagtgcggaggggcgcgaggttttaagatggcggtagttgaggggttgatcgagagatttagttgaaggtttttacgaagtgaaagaggtcgggagtcgttttttattcgtttttcgtagttttgggagtatagtagaagtgtgagtgtattgaattgatttattatttttttttatttttttcgttttttttacgtttcgcgtagcggtttgggggatatttagtttttttgtttcgttttttttttttttggttgaggtttttttgttgcggattgggttatttttgggtttggggtggcgcggcgattagtggttgcgcggttggtatcgttcgggtcggttggggtcgttttttacgtacgttgattagtagttttaggtttgacgttttgtatttcgagttatggtcggttagtcgtcgttatggtttcgttagttgttggtgttgttttttttggtgaatttggattttattttattgaagtttttttggttgtttagagttatttaacgtttatttggtttgattttttagtcgttttcgtttgtagataaaaaattaatttgtagatttaagttttagtgtttttcgtaaaattttttgtaattcgtattcgttgtgttttatttgtgggggaggagatttagaatatgagtttgaggaaatttgagaaaggaaagtataaaaaacgtaggtaattaaagatgggagagtttgtatatgtattgattttgtttgtttttttttttttttattttttattttttgttgtttttttatttttttaatttttttatttttagttttttttagaaggaaattatttgatagggtgtatggtagttaggttaggaatatggatttattataaagattttagttaagtagtgagttaaatattataggatattttatttgtaattttattgtattattagagttttgttataaagtaattgatgtttttattttttagatgaggaagttaaaaattagagtttttgatatcgttgttttgaagtaattgttattagaatagttgtgaaatatttggttttttgaaatatttggttttcggggtagttggatatttggtgaaagagatattaattgtaataaattgggttgataaaatttttttttttttatttttaaaaagtgtttatttgtaaaaggaagtaaatttgttcgtttttattattggaaagattgcgttttaaaaaattaagttttattattttggaataagaggaagaagttatgtaatagggtattgtgttaataaaagttttagtttataaaatattttttttttaaataaaaataagtattttttttaattattttaagaaatatatattg

SEQ ID NO: 96 - DNA, 2403 bp, Artificial Sequence
  chemically treated genomic DNA (Homo sapiens)
cgcgggcgcgggagtagtttcgttgggcgttcgtagtcgcgggagttaagttttttttttaggtgtaggtataaaagtttatggtttttgaataatgcggggtagaggtttttttaagtaacgtttaattggtcgtttttaattaaggaaagagaggtttttagttttatggtaatttaagtagggtagttttaggttaaaggtattttagaataataagattattttaagaaatggaatgttttattggatattcgaataggttttttgttattggaattggtgtgtattgtattttaattagtatttttgtgtggagggaggcgatttagtttaggaaagttaattatagaaagaggtgattttcgaaaggattgttttagcgttattagaatatatgtgattatattaaaagtttaggcggatattcgtagttagttcggatttggataatttaatattgttggtagaattgaagggaataagttattttaattttattttttgtacgcgtagtgttgagtgagttgggggtgggaggatagcggttcgtttattgtttttttttaaaatttgagatttgaaaatatggaggttttattcgtttttttagtttttgattgttaataaaaaaataaatttcgttggttatattttttttttattttaaaatagtaattttatggtttgtattaagttttttagaagtttattttatttgttttgggttagggagggaataatgttaggaaaagttatcggtgtttttttattttcgttttttttagggtgtaggatgtgcgggtcggcgggtttgtgatttcggaacgttttttgttatttttttgcgcgaatttgaaaggattgggaggtgttgagagtagagtttagggttggtgtattttgcggtgttgagtgggcggcgcgttcgggcgtttaggtcgggggatttgtagtcgttttatcgcggaggggaaaatacgtagttggagggcgtgcgtcgtgcgggttgtgattcgttattttatcggttattttggggtttttttaagtttttaggtagggttgtgagagttttttagagttgaagtttcggaggttgatttgtgggtttggttgttatgggaattcggttggtttaaagaagtttttttttcgggtatttggaattttagtttagtgtggggtatcggggaagtggcgttggggggttgggttgggggattttagtcggtagtttcggagagggtttatttttggggtcgttgggtgaggtcggtacgatttttggttttaaaaggaaagtttttgttttttgttttggcgcgagaagttaaagatttattttgagagcggagagagaaatgttattggtaacgttttttttggaaagttcgagaggggttttttggatatattatttagtgtttttaaattagagaagtagtttttttttggtgtttgggtttagaagtcgttatttatttagtttatggttcgaaattagtatgggaagcgtcggggtaaggtttcgtcggagattagaggtttgtttgtcgggaggagtttttgggggatggggattttatttttttgtttgttttggtttttatttgggacgttttcgtaggagtttagaaagacgatttattatatggtttcgggatagagtagcgcgtttaattttgagggaattttgtgcgtttttttgaggttttagttttttaaggtatcgtcgttcgtttttttttttttagatcgaaattggggaagagtgtgggcgtttttttgtttcgatgagttcgtttttttaaacgtttatttcggttgtattagagtatttgggaaattttgaaaggtgtttaggttttatatagtagcgtttttttatttagtttttgtttttgggtttttttaagagagtttttattttatgtttcggttttttttcgatgtcgggttttcgaggtaggtacggagtttttttgaaagtagttgtttatttgtgtttttttggtgtaaagttagagtttattttgttgggggaaggggaggtagaaaagattatagttgggaaagtgcgtttttcgttttgtttttaaaatatgttttaagattgttatcgcgattgttaggagagttattaacgtttaggggttataaaggaatttttgaattttcggttttttttaaatttttaggtttttaaaattttagtgggggttttttggggttgggatttaggttggtatcgttgggaggatttcgtttagtatttttttattaatattttacgaaggtaggtttttgttttttttggagttttttttttcggaatgtttttaaattttggttaatttatttttttgtgagttattttagggttttgtggttcgggaagag

SEQ ID NO: 97 - DNA, 2403 bp, Artificial Sequence
  chemically treated genomic DNA (Homo sapiens)
tttttttcgggttatagagttttaggatggtttataggggagtgagttagttagagtttgggaatatttcgagaaaagaggttttagagaaggtaggagtttgttttcgtgaaatattaataaagggatgttaggcgaggtttttttagcggtgttagtttgaattttagttttaagagatttttattagggttttaggaatttgggggtttgggaagggtcgagggtttagaaatttttttatagtttttagacgttgatagtttttttaataatcgcgatgatagttttgaggtatgttttaggaataaggcgaaaagcgtatttttttaattgtgattttttttattttttttttttttaataaagtaaattttaattttatattaaaggggtatagataggtaattgtttttagagggatttcgtgtttatttcggggattcgatatcgaagaaagatcgaggtatgaggtagagatttttttgaaaaaatttaaagatagaggttgagtagggagacgttgttgtgtgaggtttgggtattttttagagttttttagatgttttggtgtagtcgaagtaggcgtttggggaggcgaatttatcggggtaaagaagcgtttatatttttttttagtttcggtttagggaaagaagaacggacggcggtgttttggaaagttagggttttagagaggcgtataaagtttttttaaagttgggcgcgttgttttgtttcgggattatgtagtggatcgtttttttgggtttttacggaggcgttttaggtgggaattagagtaagtaggagaatggggtttttattttttaggggtttttttcgataggtaggtttttagttttcgacgaagttttgtttcggcgttttttatgttgatttcgaattatgggttgagtgagtggcgatttttgagtttaggtattaaagaaaaattatttttttggtttgggggtattaggtagtgtgtttagaagatttttttcgaattttttaaagaaaacgttattaataatattttttttttcgtttttaaaataagtttttggtttttcgcgttagaataagaagtagaaattttttttttggagttaagaatcgtgtcggttttatttagcgattttaagggtaggtttttttcggagttgtcggttgaggttttttaatttagttttttagcgttattttttcgatgttttatattaaattggaattttaggtgttcggaagaaaggtttttttggattaatcgggtttttatagtagttagatttataggttagttttcggggttttagttttaggggatttttatagttttatttagaggtttggggagattttaggatgatcgatggggtaacggattataattcgtacggcgtacgttttttagttacgtattttttttttcgcggtagggcgattataggtttttcggtttgagcgttcgggcgcgtcgtttatttagtatcgtagagtgtattagttttgaattttgtttttaatattttttagtttttttaagttcgcgtaaggggatggtaggaagcgtttcgggattataggttcgtcggttcgtatattttgtattttggaaggggcgaggatggaagagtatcggtgattttttttagtattgttttttttttggtttagagtaaatgagataaatttttgaagggtttaatataagttatagggttgttattttggaatgaggagaaaatgtagttagcgggatttgtttttttgttggtaattaagagttgggaaaacgaatgggatttttatatttttagattttagattttaaaagggggtaataaacgaatcgttgtttttttatttttaatttatttagtattacgcgtataggggatggggttggggtaatttgttttttttagttttgttagtaatgttgaattgtttaaattcgagttggttgcgggtgttcgtttgggtttttggtgtggttatatgtattttaatagcgttaagataattttttcggaggttatttttttttgtagttgatttttttagattgggtcgtttttttttatataagagtattggttgaagtatagtatatattaattttaatgatagagaatttgttcgggtgtttagtgagatattttattttttagaatgattttattattttaaagtatttttagtttgaagttgttttgtttgggttgttatagagttggaagtttttttttttttaattagaagcggttaattagacgttgtttggaaaaatttttgtttcgtattgtttaagagttataaatttttatgtttgtatttggggagggggtttgattttcgcggttgcgagcgtttagcggggttattttcgcgttcgcg

SEQ ID NO: 98 - DNA, 2229 bp, Artificial Sequence
  chemically treated genomic DNA (Homo sapiens)
ttttttttcggcgttggttggtgcgggttggggttaggtggagaagtcgttttttgttaaggtgatagaacgtgttgggggtgggggtcggggttagggtcggtgtaattagggggtcgttgtttttttttggatatagtggaagtttttttcgtattattaaatttttgttattttttttgagggatttgtttttaggtagtacgtaagttgttgtttcgggtttatttcgtatttttttattgggtgaggaaggagtattttgaatggagatgggggtgttttcggtttatatatttgtagagaagaggtgtgtcgggttgtatttttggaggtcgcggtaattgatattagagaagatttcggttgtagttgggaaggtttattggttggaaagaggtgttttttttttttagtaaagggttttgtttggaagggttgttttttatttgtttagtggtattataggacggtcggtttttattcgaattttttcggacggtattattatatagtcgggttttcgtagtgttggttttttaattcgatgattgttatttcggtgaggatttgtgttgatggtcggagaattttgcgttgcgggcgtatatggttaggtggcgtttggtaggcgacgttcgggtgtaggacggcgtttttatcgttttattttaaatcgttgtttgggtttaggtttttcggttttttgaataggggtttggggggttaaggacgttgaggtttcgggggtaggaagttttttttggttaagcgttttttttttttttcggtatatatttttttatttatttatttcgtttattttcggggcgagaggtttattaaggtagggcgcgttttttttatgaattattttaaggtttttgagtcgcgggggtttcgggtaattatttttttttttttttggttttaggtattttagtttaggggtttgtagagaagttcgaagttcggataaacgcgtcggacgttaataattttttatttttggtagtagtaaaggttaatatatttttattttttattttagtttgttattaaaataaagttgcgcgcggttgagggtaggaaggcgttgagatcgagaagaagggacgtttcggagaaagtgcgtttagttgattttagaaattagagtttttcgggatttcgtcgagattttttgtagggcgttttaatttgtttttttattgcgtgtcggcgtcgtagcgcgtgcggtttagggtttggtgatttcggtttagttcggcggtcgcggcgaggtttttggcgtagtcgtttggaatttcgtattagaatcgggatcgcgtaaatgttttggttgaagtgttattttatttaagaaatattgttgttaggaataaaatggggttttcggtgtttcgaagtattttttgaaatttttttaaaataatttataaaaaatgtttttgttttaacgttttataacgtttaaggaaatatgtaaatggtttgtttttttatcgagatggtcgttttaattaatagtgtatatatatataataatttttttaatttttttttttagagttaagtattttattatatgtaaattataataaagaaaagattgtgtaagattatgtaagtcgattgatttaaaatattgagttttaatttaggttttttgtttttttatttaataatttttgtgtttggattagattggtgaagtaggttatggaaattaataaagtaaaaaattaaaagtattttttttcgttatttttttttttaaaattaaataatagtcgtttttttttgagtaggttttagttttaggttcgagtttttttgcgattattttatagttatttatagtagttgttgttgtttttgtcgggttttcgtttttgttttttttgggtcgttttttgtatataaaatatattttagttttttaattaaatttaaatacgatttcggtagaatttatatatttcgtggtgtatggattgtgtcggtgtaggggaaataaatattttttggtatttaattattgagtttaattcgaaaaatcgggattgggtttttaggcggtattttaggggttttaatttggttcgcgtttttttagattttggcgttgagagcgttgtttttgcgggtgggtggacggagaggtaataatttgtttttaataaaaatttgtcgttatcgaatcgaaagcgaaagggaagggagaag

SEQ ID NO: 99 - DNA, 2229 bp, Artificial Sequence
  chemically treated genomic DNA (Homo sapiens)
ttttttttttttttttcgttttcgattcggtggcgataggtttttgttgaaagtagattgttattttttcgtttatttattcgtaaaagtagcgtttttagcgttaaggtttggggaggcgcgggttaggttggagtttttggggtgtcgtttaggggtttagtttcgatttttcgaattagatttagtggttaaatattagagggtatttattttttttgtatcgatataatttatgtattacgaaatgtgtaaattttgtcggggtcgtatttgaatttagttagagaattggggtgtgttttgtatataagagacgatttaaagaaggtagaaacgaaaattcgatagaagtagtaatagttgttgtgggtgattgtggggtgatcgtaggaaaattcgagtttgggattgaagtttgtttaggaaggggcgattgttgtttaattttggagggagggatggcgaaggaagatgtttttaattttttattttgttaatttttatagtttgttttattagtttggtttaaatataaaagttgttaaatagaaaaatagagggtttggattaaaatttaatattttaagttaatcgatttgtatgattttgtataattttttttttattataatttatatatagtgaagtgtttagttttgaggaggaaagttggaagaattgttatgtatgtgtatattgttagttaggacgattatttcgataaagaaatagattatttatatgtttttttaaacgttgtaaaacgttaaagtaaaaatattttttgtaagttgttttaagaaaattttagaagatatttcggagtatcggggattttattttgtttttgatagtagtgttttttgaatagggtgatattttagttagggtatttgcgcggtttcgattttaatgcgaagttttaagcggttgcgttaggaatttcgtcgcgatcgtcgggttaagtcggagttattaagttttgagtcgtacgcgttgcgacgtcggtacgtagtaggaaaatagattaaaacgttttatagaaaatttcggcgaagtttcggaggattttggtttttaagattagttgggcgtatttttttcgggacgtttttttttttcggttttagcgtttttttgtttttagtcgcgcgtagttttgttttggtggtaaattgaaataagaaatggaaatatattggtttttgttgttgttagggatgagaggttgttgacgttcggcgcgtttgttcgggtttcgggtttttttgtagatttttggattggggtgtttgaggttaggagaggagggggatagttgttcggagttttcgcggtttagaggttttgggatgatttatggggggggcgcgttttgttttggtgagtttttcgtttcgagggtaggcgaggtgggtgggtaggggagtgtatgtcggagagaagagagaacgtttaattagagagaattttttgttttcggagttttagcgtttttagttttttaaatttttgtttaggaagtcgaaggatttaggtttaggtaacggtttggggtggggcggtaagagcgtcgttttgtattcggacgtcgtttgttaggcgttatttggttatgtgcgttcgtagcgtagggtttttcggttattagtataggtttttatcgaggtgatagttatcggattgggaaattaatattgcgaggattcggttatgtgatgatatcgttcgggggaattcgagtggaagtcgatcgttttgtggtgttattagataggtgagaagtagtttttttaaatagggttttttgttggaaggaggaggtatttttttttagttagtgagtttttttagttgtaatcggggttttttttaatattagttatcgcggtttttagaggtgtagttcggtatattttttttttgtagatgtataaatcggggatatttttatttttatttaagatgttttttttttatttagtagaggggtgcggagtaaattcgggataataatttgcgtgttgtttggaagtaggttttttagaaaggatgataaaaatttggtgatgcggaagaagtttttattgtgtttaggaaagggtagcggttttttagttgtatcggttttggtttcggtttttatttttagtacgttttgttattttaataaagagcggtttttttatttgattttaattcgtattagttagcgtcgaggaaaga

SEQ ID NO: 100 - DNA, 2354 bp, Artificial Sequence
  chemically treated genomic DNA (Homo sapiens)
tataatttttggagtcgttattttcggtttattattatcgattgttttgggtttgatggagttagtttcgtaatatttgtttagaattttatttatatattcgttggatatttgtataggggaagtggatagaaaattatattattaataattttaagataaaaataaaattgtttaagtatgtattaaataatgataagtttacgttttgattgtttagtatttggatttttgtatttgtatgggtttataatataaaaatatatttttaatggtatgagaatttattgtagagagtttttttttttaaaattatatttgtagttttaaaaattataaatatgatgatatttttaaataatttgaattaaaaaacgaatttaaaagttttttttaaaaaaaaaattttttttaaatattgtttgaagatgtattaaaacgaagtagataaatttatttttgtgttgattttgtttaaagtggcgttatgttttaaagaataaaggtaaaaaataaattgatttttttatttttttttttttaaaaaatatttaattgagtaaatgtgagttagggaggagtaaatagtatttgttttttaaaattaatatatattatttataaatatgaagaataaataaatattttaaaagttgaggtaagtatgggttggggagagtagaatgaaattatgtcggtttatataatttagtttattacggtttataaattgtttttataatgaatgtttttattaaataaaaagagaaagatttttttaaaaaaattcgtatataatatttttttgaagtagatgagttattttatgtaattgatttaggttgaaagagatagggaaggatggtggaaggagaggggaaagtgggaaggtaggggagtgggtggggggattggggattggggtgggtgagggtgggggggtttataattagtatcgtttatagtaagaaatgaagagagggcgttgagagtggagggtcgcgggggcggcgagtggggcggcgtcgggaggattatttgtagaattcgggaaatgtcgtacggtcgggtttcgttgtgagttagttttataattttttgtcgggtggagttcggtagtggtcgttcgttgataaagatattatcgagttgatttatttcgttgtgatttgaggaaagggagaggagaggaaaggggaaaagaagagaagagagtagagtgaagaggaagaagagggagaagaaggaagaggaagatgagggagaataagaatagaaaggagaggaggaaggggaagaggaagaaggagaggaggaggagataattataatgtatttttatttttttgttaatttgtgttaatttcggcggttagttttttgttatcgattaaataaaggataataggattattagttatgttagatatcgggtagtttagtttaagtaatcgtgtttttgtttattgtattgtagtagtaatatagagttagatatatgttaaggaataagtatatatggattttattatagttataattttagtagtgtttttagtttattgtttttttttataaatattgtagttagtttttgaatttataaagcgttaagaatcggttttataaattttttaaagattttttttgagtgttatcgtaaattatgggttttatagattttatattgaatttttaaggtttttgtagtgttgggatagtgatagtaaattttatagtttttgagtgtttttttagacgttaaaatttagaaatgtttttattatcgtttaaattggttaaggtttggtataagtatcgagttgggttttgtttggttagaatagaagaaggaagaggagagaataattagagtagttagtatgtggttggtgaattttagtttaggttttcgtatttttagtgtagacgtgagagttagagttcgggttcggttttagttatagataagttcggttatcgtaagtaaggtttagagtcgggagtcggttcgtattagttattgttcgttttattttcgtcgttgaatttcgttttttttttagttaaggatagatattattaaaaagaaaaaatagaaaagaaaaatattatattatagtgttttttattttttttttatttttgtattttataattttatttttgtggtttaattttagagaatagggagagggagttagtttttttttgtagtttttttttttaaaaattatagatatataaagttaattgttaatttttatttttttaaaaatttttaatttgtagtttcgatttagatagtagtttttttaggaaaagacgtggttttttgtttagttttttttttt

SEQ ID NO: 101 - DNA, 2354 bp, Artificial Sequence
  chemically treated genomic DNA (Homo sapiens)
ggagaggagagttgaatagggagttacgtttttttttgggagggttgttatttaagtcggggttgtaggttggagatttttaaggaagtggaaattggtaattggttttgtgtgtttgtggtttttggggagggggattataaagaggggttaattttttttttttattttttaaggttggattatagggatgaggttgtgagatataaagataaaggagggatggggaatattatgatgtggtattttttttttttgttttttttttttgataatatttatttttggttaaggggagggcggagtttagcggcggaaataaagcgagtagtggttggtgcgaatcgattttcggttttaagttttatttgcggtggtcggatttgtttgtggttgaagtcgagttcgggttttgatttttacgtttgtattggaggtgcggaaatttggattggggtttattagttatatattggttgttttggttgtttttttttttttttttttttattttaattaaataaaatttaattcgatgtttgtgttaggttttggttagtttggacggtgatggaaatatttttggattttagcgtttaagggagtatttaagggttgtaaggtttgttattattgttttaatattgtagagattttgaaggtttagtgtgggatttgtagaatttatggtttgcggtgatatttagaggggatttttgggagatttatagagtcggtttttagcgttttgtgggtttagaggttggttgtagtgtttatgaagaggggtagtgggttggggatattgttggggttatggttgtagtgaggtttatgtgtatttgttttttggtatgtgtttgattttgtgttgttgttgtagtatagtgggtaggggtacggttgtttggattgggttgttcgatgtttggtatggttggtggttttgttgttttttatttgatcgatagtagggaattgatcgtcgaggttggtataggttggtagggggatgaggatgtattgtggttgttttttttttttttttttttttttttttttttttttttttttttttttgtttttgtttttttttattttttttttttttttttttttttttttttttttttattttgttttttttttttttttttttttttttttttttttttttttttttaggttatagcggagtgaattagttcggtggtgtttttgttaacgggcggttattgtcggattttattcggtagaagattgtagagttagtttatagcggggttcggtcgtgcgatatttttcgaattttgtaggtgattttttcggcgtcgttttattcgtcgttttcgcggttttttatttttaacgttttttttttattttttattgtaaacgatgttaattatggatttttttatttttatttattttagtttttagtttttttatttatttttttgtttttttatttttttttttttttttattatttttttttattttttttaatttgggttagttatataagataatttatttgttttagaaaaatattgtgtgcggatttttttaaaaaaatttttttttttttatttggtaaagatatttattgtgggaatagtttatgaatcgtaataagttgagttatataaatcggtataattttattttgttttttttagtttatgtttattttagtttttgaggtatttgtttattttttatgtttatgaataatatatattgattttaaaaggtaaatgttatttatttttttttaatttatatttatttaattgagtattttttaaagaagaagaagtaaaaaaattagtttattttttatttttgttttttaaaatataacgttattttaagtaaggttagtataaaaataaatttatttatttcgttttgatgtatttttaggtagtgtttaagaaaagttttttttttaaaaaaagtttttaaattcgttttttagtttaaattgtttgaaagtattattatatttgtagtttttagggttataaatgtaattttaagaaaaaaagttttttatagtaagtttttatattattgaaggtatatttttgtgttatagatttatgtagatgtaaaagtttaagtgttggataattaaaacgtaagtttgttattgtttaatgtatatttaaataattttatttttgttttgaaattattaataatgtggttttttgtttattttttttatgtaggtgtttaacggatgtgtgagtaaaattttgggtaggtattacgagattggttttattagatttagggtaatcggtggtagtaaatcgagagtagcgattttagaagttgta

SEQ ID NO: 102 - DNA, 2738 bp, Artificial Sequence
  chemically treated genomic DNA (Homo sapiens)
tgtattgttgagggttatcgattatcgagaattaggtttagtttttagaggaagcgttagaggagggggagggtgggcgagggtttcggggtggtgggggtgtcggttttagtatgtggaggcgataggattcgtaagattttacgcgtcgtcggggtaggatcgtatagggtcgttatttatttatttggggcgtttttaatgggtattcgtgtattttagttcgtgcggtgagcgtacgtacgtcgtcgttgtcgcgtttatacggttttttaaagtcgggggaggggtcgtggagcgaaggagttgtaggtagatttttttttttttttcgagttgggaaaagggttagtttcgtgttttgtacgtttggttttgttttgtagtttgtcggtgagttaagagtcggtagagtagaggaggcgtacggttcgggtcgtgttattattttttggtttgttgatttggttaggagttggggatggcggtagtatcgcggaggtacgttttgcgttgtttttacgttttttttcgaaagtagtgtttttagggggaaagttcgtaatgttatttgtttcgtcggtaaagttttgggatgtcgggtattttttgaggagggggaagacgcggtatttttattgaggtcggtaggttaggaagagaagtttttcgggcgtagggcgtagtttagtttcggggattttttgggtttttcgcgtgtcggtcgggatgaagcgcgttttgtatcggattcgggattcgggggcgggggttggcgttggtagcgttagacgttgttttattttttttcgattttggggaggatagtaataagttttgttttagttattttattattttgttagtacgtgtagatttcgggttttcggagttcggcgcggatttcgttttgtttcgcgtttttttttgtacgtttcgtgttattttaagagtttgcgtggttttgggtgggcgtttggttttcggcgaaacgtttggggcgcgtcgcgtgggtgtacggtgtttttttttagtagttttcggttgcgggggtatatgtatttatttgtattttgtagggataggcggtttttttgttgggagtttttgttttggggattttcgggtgggttggtggcgtcggtttttcgcgtcgggttaaaggtggttaatattaaagttagggttatgaattggtttagtcgttcggtatatatggtttttggtattaatttttcgtcgggagatttggattttttgtgttttttttttttttttttttttttttttttttcgtcgtttttttttttttttttattttttttttttgttcgttttttttttttttttcgcggtcgcggttcggatagaggttatttagcgttttttcgtagtttttcggagagtatgtgattaggtcgttagtagcgtcgcgagtgttcggtaatggtagggatggtgttttaaatatttttggaagttttggtgttatttgaatgaaggagtcgagtaggtgttgtttcggcggttggattaattcgagatttcggtttttttgataatacggtcgggaggcggggtttgcgtttaattattataggaggaagtcgagcgtcgttgggagcgtcggataaagttgtcgatttggcggcggttacgcgtttgcgtgcgtgtgtatgagtgtgtgtgagcgcggtcggagatgcgtgcgcgtgtgcgggtgttttagggtaatggtcgaaaggattgtataatataagagcgaatttaagttttagttgttgttaaagggggacggtgtgttttgggatagtgtttttggggtttttggttcgcgttatatttatatcgggttgggaaagtttttttttttcgtcgtttggaatttagtgagatttttagtttagaggatttgataaattgaagtagttttttaggtataatgatgttgtgggttaattgagtatatatgggaatttttggttttgtgatattttgtattaaaaagaattttacgattgaagataggagtagaagtattagatatagtatttggtttgagtaattgttttattttttcgttttggtgggtcgtgtaatatttggagtgtcgtttttcgttttttttttaatttagacgtattttaggttgggttgtagggatttaggtgatagttaggatttgtattatttttaggagggtggtagggaggtttaaggtagttttgagttagttcgtcgcggagtatcgcgtgttcggaggttagagtttgaaaggtaattttacgcgtttttaaatatatttttgtatttttttaaagcgttgttcgttatttcgtttcgggtttttttttattttttagttattcgatggaagtggtgagaataaaaataaagataaaaaagttaaattcggggaagttatttttattttttttttttttttgttcggttttttttttaagaatcgtcgggtcgggatagttttcggttatttttttattcggttcgtggagggaaggagaaagttgggcgtcgtttggagcgtttttttttttgttgtgtgtgtacgtgtgtacgtttacgtttttttcgcgtcggggtcggggataggaattgttttcggtttcgttattttacggcgtagttcggggggttcgtagggttgggggagggcggggatacgagcgtcgcgtttaagcgttttagggtacgtattcggcgttggcgcgtattcg

SEQ ID NO: 103 - DNA, 2738 bp, Artificial Sequence
  chemically treated genomic DNA (Homo sapiens)
cgagtgcgcgttaacgtcgggtgcgtgttttggggcgtttgggcgcggcgttcgtgttttcgtttttttttagttttgcgagtttttcgagttgcgtcgtggggtgacgggatcgagagtagtttttgttttcggtttcggcgcgggggagacgtgagcgtgtatacgtatatatatagtaggggaagaggcgttttaagcggcgtttaattttttttttttttttacgggtcgggtgagaaagtagtcgggggttatttcgattcggcggtttttggggagggggtcgaataagaaaagggaggagatggagataattttttcggatttagtttttttgtttttgtttttgtttttattatttttatcggatgattggagagtaaaagggaattcggagcggggtggcgagtagcgttttgagaaaatgtaggagtgtgtttggagacgcgtaaagttgttttttaagttttggttttcgggtacgcgatgtttcgcggcgggttgatttagggttgttttgggtttttttgttatttttttggaaatgatgtaagttttgattgttatttggatttttgtagtttagtttggaatgcgtttggattaggggaaagacgagaaacgatattttaggtgttgtacggtttattaaagcgggaagatagggtagttgtttagattaaatattgtatttagtgtttttgtttttatttttaatcgtggggttttttttaatgtaaagtgttataaggttaggaatttttatgtgtgtttagttggtttatagtattattgtgtttaggaaattgttttaatttattaagttttttgggttgggaattttattgaattttaaacggcggaaagaggaaatttttttaattcgatgtgggtgtgacgcgagttaggggttttagggatattgttttagagtatatcgtttttttttaatagtaattggagtttggattcgtttttatattgtatagttttttcgattattgttttggagtattcgtatacgcgtacgtattttcggtcgcgtttatatatatttatatatacgtacgtaaacgcgtggtcgtcgttaggtcggtaattttgttcggcgtttttagcggcgttcggtttttttttgtagtagttgagcgtaggtttcgtttttcggtcgtgttgttaaaagggtcggggtttcggattggtttagtcgtcgggataatatttgttcgatttttttatttaagtgatattagagtttttagggatatttgaggtattatttttgttattgtcgggtattcgcggcgttgttaacggtttggttatatgtttttcggagagttacgggagggcgttgggtaatttttattcgagtcgcggtcgcgaggaggagggaaaaggcgagtaaaaaggaagagtgggaggaggaggggaagcggcgaaggaggaagaggaggaggaggaagaggggagtataaaggatttaggtttttcgacgggaggttaatattaagaattatgtgtgtcgagcggttgggttagtttatgattttggttttggtgttggttatttttgattcggcgcgggggatcgacgttattaatttattcgagggtttttaagataggagtttttagtagaaaggtcgtttgtttttgtagaatataggtaagtgtatgtgttttcgtagtcgggagttattgggagaggatatcgtgtatttacgcggcgcgttttaggcgtttcgtcgggagttaggcgtttatttagggttacgtaaatttttgggatggtacgggacgtgtaaagggaagcgcgaggtaaggcgaggttcgcgtcgggtttcgagggttcggaatttgtacgtgttagtagggtgatgaaatggttggggtaggatttgttgttgttttttttagggtcgaggggaaatgaagtagcgtttgacgttgttagcgttagttttcgttttcgaatttcgggttcggtgtaaagcgcgttttatttcggtcggtacgcgggaggtttagagggttttcggagttgggttgcgttttgcgttcggagaatttttttttttggtttgtcggttttagtaagggtgtcgcgttttttttttttttaaaagatgttcgatattttagaattttgtcggcgagataaatggtattgcgaattttttttttgggggtattgttttcggaagggagcgtgagggtagcgtaaagcgtattttcgcggtgttgtcgttatttttagtttttggttaggttagtaagttaagaaatggtgatacgattcgaatcgtgcgttttttttgttttatcggtttttggtttatcggtaagttgtaaagtagagttaggcgtgtagggtacggggttggttttttttttagttcggaaagagaaagaaaatttgtttatagttttttcgttttacgatttttttttcgattttggggggtcgtgtgaacgcggtagcggcggcgtgcgtgcgtttatcgtacgagttggaatgtacgagtgtttattagggacgttttaagtgagtgaatggcggttttgtgcggttttgtttcggcggcgcgtggggttttacggattttgtcgtttttatatgttggggtcggtatttttattatttcgagattttcgtttatttttttttttttttggcgttttttttgagaattgaatttgattttcggtggtcggtgatttttaataatata

SEQ ID NO: 104 - DNA, 4102 bp, Artificial Sequence
  chemically treated genomic DNA (Homo sapiens)
gcgttgttatttatttcgttttttttcgcgtatagttaatggagagatttagtcgaaatcgcgaagtttttttgtatcgggttttttcgtttggtgattgatgttttagagttaatagcgagcgagtagtcggagcggggaagtagaagttagagaggggaagaatacggcgttttttttttttttttttttttttttttattttagtttttttgcgtatttcgtttttaagttttcgcgtagttaggagtcgttgttgttttttagtttttgttagttgtttttcgagtcgagcgtagcgagcgtcgtcgttcgggtttttcggtggggttagggttagtatggagtatttgggttcgtattatttttattcgggttacgtagagtttattagtttcggtatcgattagatttttaatagttcggattagggtggttgtatgggattcgtttcgcgtttttaggacggagaatacggttttggttgtttggtcggaggcgtttatatttacggcggcgggggtttcgcggtcgcgacgggggttggaggagcgggggtttatggtattggaggtttcggcggtttcggaggttcggtaggcggcggcggcgtttgtagtatgggttttttgatcggtttttataacgtgaatatggttttggtaggcggtttcggttttggcggcggcggcggtagtagcggcggtgtcggggtatttagcgttgcgggggtaattcgggtgtcggtatataggtcgttcgtcggagtcgtggtttatttttagtttttggttatcggtttgtttatcgtgttttttgtgtttgttatgtcgggcgttaataattttattggttttatttttttttggatggagagtaatcgtagatatataaaggataggtttataggtgagttcggttcgcgcgtttttcgtttggtcgcggttcgggtttcgtgttatttttgtttcgtcgggtggttttttaaagtcggttttgcgttttaggtcgtttagttttttttggtgttttttttaagttgagtcgttcgttcgattttataacgtagattcgttatgtttgaagagtttttttagtttggatttttttttgtttttcgaaggatttttgttcggaggagttttttttggtttttttttcggatttattagtcgggttaggtagagagaaggaggttatagatttaggattattttttgtagttatttttggtttgggaattttagagaaaggggtgtaacgtgaatagtttttttcgttttggttgttgttttaggatttaggaagcgagttttaggattagatataagaaaagaataggtttttttatttttagttttttatatatatgtatttcgcgtttttagtttcggtgttcgtggtgttgcggggttagtgggggttttgagtttcggtaaattagtagaattagtggttttttttttttttttcggagagtaggttttatttgggaggatggtagcggggtttagtcgtttaggatagttagttttttattttcgttttttttcggttgggtgttttatttcgggtttagttttgttattttgggtacgaataatgtatcggtaggttggtgatcggtggcgggaagattattttcgggatattgggtattaagtggtggtcgttgtcgttttttttgttgttcgttttcgtttttttttgttggttttggttttttttgttttcgtttttattttgggtatttaattttttttttggcgtggattttttttttcgtttttattttttgttttttttagggttttttggattttagattacgattttttcgttcgggttgggaagtagttataaattgagtttaggttagttagtcgattttagagagaggaggtaggaggtattggttgttgttggtagagatggggttttttgggggtttttcggtttaagggtttaatagtggaaggggggtttatataattatttgggagaagttgttgagagttagatattgggttaggagattttaaagtatttttggttttttgtttttgttttaggtagtagtatagttagggaaattgtttttgtagttttttattagattttggggttacggtagaagtggtgtggaggttggtgtttagaggaagaatagttgtttgggtttaggttttaggaagggttttttttagaggggttttagtgtttttaatttaagttttttttggtttggggtagtagggtttggtgtttattttattttttatttaggttaggttagttttgaagggttttgttggaaatttagtcgggagtttattaattttgggtttttggtgaaaggtattcggtttagggtttatcgcggggttttaatattgtgttaggtatgaaggcggttttagcgagtgtatggttgtggttttgttttgttttgtgttttgtgtgtttgtttcgtgtttgtgtttgtttggttttgtttgggtgtatagatttgtgagtttgttttcgttgtacgttgtgttggtgtgtgttgttgtggatggaggtttaggtcgggttttagagttaggttcggttttttattttgagtttgaaggtttggggttgattgaggggaggggagcgtgattattagttcgttttagattgtttttggaggagaggcggtagggaggtggttgggttcgcgggagttcggggttagggaggttttcgtggtagcggcgacggcggcgtcggattggcgggtaggaggaggtcgtttttcgtcgtgggtttgtcgttgagggttaacgggaggatttcggttttgttcgtgggggtttagttgttgcgttcgttgattcgcggggtgttgggtttgggacgttttttgacgttttgttgtttgtttttgtcgtttgtttgtttttcgttttagtggtttttttattttttattgtaatacgtcgtataggttatttttattagaatcggacgttttttaagaagaagaagtcgcgtacgttttttatacgtttgtagatttgcgagttggagaagcgtttttatcgttagaagtatttggtttcggtcgagcgcgtcgttttggttaaggcgtttaaaatgatcgatgcgtaggttaaaatttggttttagaatcggcggataaagtggaggtgagtaagcggggcgggtcggtcgttcgcgagcggcgcggttttaggtagttttcggtttattggtttttcgtggggcgtatatatttttttcgttcgcggtttttgattttttcggaggagcgagttttcgttaggtttgcggggagttggaagtaatcgaggtcgatagttgggatggggttgaagagttttggttttgttttatcggaggttttagggttttttggttggtatattttttgtcggtgtagacgcggtaggtttatttcgtcgtttgggtaaataggcgggttagtgtattttacgtagtttaggttttagggatttgtgagttttggggagttttttgtttgcgtaaatttttgtttatggaattttgttttgttttggagattggatgtagaatagttcgtattttgttgtagcgttttagtcgggttttcggtagagggtttgtggttttagatcgcggttttgttgacggtttttttttttagatattcggtttttgcgtagtcggtttttattttggaaggagaaaattaattcgcgtcggttgcggcggggtttcgcgggttttattggaaggggaattaattaggagtagatgggtgtgtgtgagaaagagaatttttttttttttatagttataattttagttattacgtaatgggttttttgttttgttttgtttttttatatttacgtttacggacgtgaagcgtttttaatattttcgagtagttttttttttcgcgcgtattgacgtttttttcggttgtattttttggtacgttgtattttttggtacgttgtattttttcgtatatttggtttttgttcgtcggagttttttttttagtttaggttttatggggtagcgcgggagagtttgggcgaagtcggcggcgtcgagacgggcg

SEQ ID NO: 105 - DNA, 4102 bp, Artificial Sequence
  chemically treated genomic DNA (Homo sapiens)
cgttcgtttcggcgtcgtcgatttcgtttagattttttcgcgttattttatggggtttgagttaggggagaaatttcggcgggtaagggttagatgtgcgggagggtgtagcgtgttagagggtgtagcgtgttagagggtgtagtcggagaaagcgttagtgcgcgcggagagggaggttgttcgagagtgttggggacgttttacgttcgtgagcgtaaatgtgaaaaaataaaataaaataaaaagtttattgcgtagtaattagagttgtggttatgggagaaggaaaatttttttttttatatatatttatttgtttttaattgattttttttttagtgggattcgcgaaatttcgtcgtagtcggcgcggattgattttttttttttagggtagggatcggttgcgtaaaggtcgggtgtttgggggaggagatcgttagtagggtcgcggtttggggttatagattttttgtcgggagttcggttggagcgttgtaataaggtgcgggttgttttgtatttagtttttaggatagagtaggattttataagtaagagtttgcgtaaataaaaagttttttaggatttatagatttttggagtttggattgcgtggagtgtattaattcgtttgtttgtttaagcggcggaatagatttgtcgcgtttatatcggtagagagtgtgttaattagaaagttttgaagttttcggtaaaatagagttagggttttttagttttattttagttatcggtttcggttgtttttagtttttcgtaagtttagcgggagttcgttttttcgaaaggattagaaatcgcgagcggaaaaagtatgtgcgttttacgagaggttaatgaatcgagagttgtttgagatcgcgtcgttcgcgggcggtcggttcgtttcgtttgtttatttttattttgttcgtcggttttggaattaggttttgatttgcgtatcggttattttgagcgttttggttagggcggcgcgttcggtcgaggttaggtatttttggcggtggaagcgtttttttagttcgtagatttgtaggcgtgtgaaggacgtgcgcggttttttttttttggggggcgttcggttttgataggggtgatttatacggcgtgttatagtgaagggtgagagggttattggagcgggagatagatagacggtagaggtaagtagtagagcgttaggaagcgttttaggtttaatatttcgcgagttagcgagcgtagtagttgaatttttacgagtagggtcgagattttttcgttagtttttagcgataagtttacggcgggaaacggtttttttttgttcgttagttcgacgtcgtcgtcgtcgttattacggaggtttttttggtttcgggttttcgcgagtttaattatttttttgtcgttttttttttaggggtagtttaaggcgagttaatggttacgtttttttttttttagttagttttaggtttttaggtttagagtaagaggtcgagtttgattttggaattcgatttgagtttttatttatagtagtatatattaatataacgtataacgggggtaaatttatagatttatatatttaaataggattagataagtataggtacgggataagtatataggatatagagtaaaataaggttatagttatatattcgttgaaatcgtttttatgtttgatatagtattagggtttcgcggtaggttttaaatcgagtattttttattagaggtttaggattagtggattttcggttgggtttttagtagggttttttaagattggtttggtttgggtggggaatgggatgggtattaggttttgttgttttaggttagagaaaatttaggttgggggtattgggatttttttagggagggttttttttgaggtttagatttaagtaattgttttttttttggatattagtttttatattatttttgtcgtggttttagagtttggtaagaagttgtagaagtagtttttttggttgtgttgttgtttggaatagaagtaggaagttaggggtgttttggaattttttggtttagtatttagtttttagtagttttttttaagtagttatgtaaattttttttttattgttgggtttttgaatcgggggatttttaggaggttttatttttgttagtagtagttagtgttttttgttttttttttttaagatcggttggttaatttgggtttaatttgtggttgttttttagttcggacggaaggatcgtggtttaggatttagggaattttaaggggagtagaaagtgagaacgggggaagggatttacgttagagggagagttgagtgtttagagtggaaacgggagtagagggagttagggttagtagaggaaggcgggagcgggtagtagagaaggcggtagcggttattatttagtatttaatgtttcgggagtagttttttcgttatcgattattagtttatcggtgtattgttcgtgtttaagataatagggttgggttcggggtaggatatttagtcgggagagaacgaaaatgaaaagttagttgttttgggcggttaagtttcgttgttatttttttagatgaagtttgtttttcggaaaaaaaaaaaaaggttattggttttgttgatttatcggggtttagagtttttattggtttcgtagtattacgggtatcggagttaggggcgcgaagtgtatgtgtgtaggggattggaggtgggggaatttgttttttttttgtgtttgattttggggttcgttttttgggttttagaatagtagttaggacggaagaaattgtttacgttgtatttttttttttaagatttttaggttaagagtagttgtagaaggtggttttgaatttatggtttttttttttttgtttgattcggttagtggattcggagaggggattagggagagttttttcgagtaggggtttttcgggagatagagaggggtttaggttgagagaattttttaagtatggcgagtttgcgttatagaatcgggcgggcggtttaatttgggggaagtattaagaagagttgggcgatttggagcgtagaatcggttttggggagttattcggcggggtaggggtagtacggagttcgggtcgcggttaggcggggagcgcgcgggtcggatttatttgtgaatttgttttttgtgtatttgcggttattttttatttaggggaaggtgaggttagtgaggttgttgacgttcggtatggtaggtatagagggtacggtgggtaagtcggtggttaggggttgggggtgggttacggtttcggcgagcggtttgtgtgtcggtattcggattattttcgtagcgttgagtgtttcggtatcgtcgttgttgtcgtcgtcgtcgttaggatcggggtcgtttgttaaggttatgtttacgttgtaggagtcggttagaggatttatgttgtaggcgtcgtcgtcgtttgtcgggttttcggggtcgtcgggatttttagtattataggttttcgtttttttagttttcgtcgcggtcgcggagttttcgtcgtcgtaagtgtaggcgttttcgattaagtagttaaggtcgtatttttcgttttggaggcgcgaggcgggttttatgtagttattttggttcgggttgttgaggatttggtcgatgtcgaagttaatgggttttgcgtgattcgggtggaggtggtgcggatttaggtgttttatgttggttttggttttatcggggggttcgggcggcggcgttcgttgcgttcggttcggggggtagttagtaggggttgggaggtaatagcggtttttggttgcgcggagatttggaagcgaagtgcgtagaaaggttaaagtagaagggggaggggagggagagagggggcgtcgtattttttttttttttggtttttgttttttcgtttcggttgttcgttcgttgttgattttgggatattaattattaggcgaaaaagttcggtgtaagagagtttcgcggtttcgattgggtttttttattggttgtgcgcggagaggagcggggtgaatgatagcgt

SEQ ID NO: 106 - DNA, 2337 bp, Artificial Sequence
  chemically treated genomic DNA (Homo sapiens)
ggatgatattaaaagttttattatttggttttttgttttggggtttttaaggagtaagggaaagttgtggttttcggtttgtgtttggttggtggttttatatttttttatttgaggttgattttttatttgaggttgatttgttatttgaggtgggaaggggtatttggagtttttagttgtagggtgagagatatttagtggttttattttttagtttttagagttataggttaggagcggagggttaaggttggcgaaaaaatttggttatgtggacgggttaaagattaggggtcgttgcgaaggtgaggatagaaaagcgttgtagaggtttttagattatggtttcgttttcgttagagagttttaggggttttagtggtttttttagtgttgtgtatatacgaggaaaggttagagaatgagagggatatagtatttttttattttttaagtttgtacggggagaagcggttgtgagttttagtattagggaaacgtagcgttggggtttgggtaggattgatcgttttagtttttattttagttgtaattttttagtcgaatagggttcgtttcggcgggttagggttttcgtttttgttgaagaattttggtttaggaaagatggagaggttgggggttgaggagagaggaaaaaatggtaggggaggattggaggtgatcgagcgtcgagtttttatatttttattattgttgttgttgttgttattattattattattattattattattattattattattatcgaagtattttacgtttagagttaagataagattataaatataatatatagaaaattaataaaatagaattttgtttttttttgaggtttttttttttatttttaggtagtatgtgttttttttagtggttttggggagggggtgggagagacgataggtttgggattagggagtttttaaggttttcgttgaggggatagcgaatttattattgaatcgtgtacgggggatatggataaaatgagacgcgatagggataagagtattttgttttgtttttaggaaatattaagtgagttcgttttttagtttttattaggaagtttgattaggttgaggcgagtttttcgggaaggaagggcgcgcgggatgttgggtgggttcgagtagtgaggttttagagtattcgtcgggagttgtgcgggcgggggcgtttaggagagcgttgggtttcgtttgtttgcgtcggagagtaggttttttggtttttttattcgagagttttttttttcgggtttttttgacgttcgtggttttttataggttttttttttcgcgttttttttttttttttagtatttttattcggtttgtttttttttttttttttcggtattgagttgagacgcgttgagtagtttgtttttttttttttattttatgcgtcggttttggaattatattttgatttgttttttcgttaggtatagggcgtgcgcgatttcgatgcgtcgtcgtcgcgttaggtagcgattgtagtgaaattttttttttagttttagcgtttggtaacgtgtgtatgtttggcggtttcgtcggtcgttgggtttaaaggaggaatttgttacgtagagtggagatgttgaggtttgcggttatcgggtttaggatttttttttttagtcgattttcgaatatagattttagttagtatcgggatgttttttattttgtcggtttttttttttcgtttcgtatttttttagcgttttttttagatttttttttagttttttaggtttgtgtcgtttgtttagattttagatgggggaggggaggagtagtttgaatttttatttgagtttggggggaggggttggttaggtgtgtttttttttagttgtattttgtttttttttttttttttatttattttgtttttatttttcgttatttttttaatttaatgataaatttaggtcgttaattcgtaatgacgtagatcgatttatagtttatattaacggttttttattttcgagttcggttaatggatattagttgggatttaaggttaataaataatttaatttgagatttcgcgtttgtttttttttttttcgtttcgtttgtttttttttttttttttttttttatttttttttttttttttgattattattttttttttggtgttttattttgttttagttttttatttatagggaaatatagttttagatagatttaattttttttttttagcgttattttttatttttttgtatgacgtatttcgtttttaatggagtcgtttttggttggggaattttattagggt

SEQ ID NO: 107 - DNA, 2337 bp, Artificial Sequence
  chemically treated genomic DNA (Homo sapiens)
gttttggtagggttttttaattaaagacggttttattaaaaacggagtgcgttatgtaagggggtagggggtgacgttgaagaggaagagttgagtttgtttgggattgtgtttttttgtgggtggggagttggggtaagatgaggtattaggaaaggggtggtagttagaggagggaggaggaataaggggaaggaagagagagggagtaggcggagcgagagagggagaaataggcgcggggttttaggttggattatttgttggttttaagttttaattgatgtttattagtcggattcgaaagtgaggagtcgttaatgtggattatggatcgatttacgttattacggattaacggtttggatttattattgggttggggggatgacggggggtgggaataagatggatggaaagggagggaaagataagatgtaattaggaagagatatatttgattagtttttttttttaggtttaggtgggagtttaaattgtttttttttttttttatttagagtttagatagacggtataggtttaggagattaggagggaatttggagggggcgttggaggagtgcgaaacgggggaagggagtcggtagaatagagggtatttcggtattggttggagtttgtgttcgagggtcgattaggggagggggttttgggttcggtgatcgtaggttttagtatttttattttgcgtaataggttttttttttgggtttagcggtcggcgaggtcgttagatatatatacgttattagacgttggagttggagaaggagttttattataatcgttatttgacgcggcggcggcgtatcgagatcgcgtacgttttgtgtttgacggagaggtagattaagatatggttttagaatcgacgtatgaagtggaaaaaggagagtaaattgtttagcgcgttttagtttagtgtcgaggaggaggaagaaaaataggtcgagtgaaggtgttggaaagggagggaggacgcgaggggaaaggtttgtggggagttacgggcgttagagagattcgggaaggaaggttttcgggtgggggagttaggagatttgtttttcggcgtagataggcggggtttagcgtttttttggacgttttcgttcgtatagttttcggcgggtgttttgaggttttattattcgagtttatttagtatttcgcgcgtttttttttttcgaggaattcgttttagtttgattaggttttttggtgagaattgaggagcggatttatttgatgttttttggaagtagagtaaaatgtttttgtttttgtcgcgttttattttgtttatgtttttcgtgtacggtttaatggtagattcgttgtttttttagcgggggttttgaagattttttgattttagatttgtcgttttttttattttttttttaaagttattggaaggagtatatattatttagaagtaagaagaggagttttagaagaaaataaagttttattttattaattttttatgtgttgtgtttgtagttttgttttagttttggacgtgaaatatttcgatgatgatgatgatgatgatgatgataataataataataataataataataataataataataaagatgtgaaaattcgacgttcggttatttttaatttttttttgttatttttttttttttttttaatttttagtttttttattttttttgagttagaattttttagtaaaggcgagagttttggttcgtcgaagcgagttttgttcgattgggaagttatagttgagataaaggttggagcgattagttttgtttaggttttagcgttgcgtttttttggtgttgaggtttatagtcgttttttttcgtgtagatttgggggatggagaggtgttgtgttttttttattttttagttttttttcgtgtatatatagtattaagggagttattgaggtttttaaagttttttggcggagacggagttatagtttgggggtttttgtagcgtttttttgtttttattttcgtagcgatttttggtttttggttcgtttatatggttaggttttttcgttagttttggtttttcgtttttggtttgtggttttggagattgaaaaatggggttattgggtattttttattttgtagttgaaggttttaggtgtttttttttattttaagtagtagattagttttaagtaggagattagttttaagtaggggaatgtaaagttattagttaggtataggtcgaaggttataatttttttttgttttttggagattttagggtaggaggttaggtgatggggtttttagtgttattt

SEQ ID NO: 108 - DNA, 2351 bp, Artificial Sequence
  chemically treated genomic DNA (Homo sapiens)
tagttgggatgtattgttgtttttttcgttattttagtagttgtttagagatgagatttagttttattgtgtttttttgggatttataagaatttttttttgggttgagggggcgttgttgtgggtgtattttatggagagttttaaggagttagggaggagttttttggtggtttgggttttggattggtgggtgttgggtgggtttttatggttgtttttggggttgttaggtttgtaaggtagataggtttttggatttgagtgtggttgtggacgagggtagcgtcgttattagaggcgatgtttagggttattttttttgatttgtttttttttttttttgatttgttttttttttttgacgggtttgtttttgagtttgatatttgtttgggggttttcggcgaaggtcgttggtttttagaatgtattatttttttttggtatgacgggaattatttgtgatattgttattatttcgttgtaatttgggtagtagttgttatgattttattatgtgtttttcgtgaggtttttatttgttattgagtggtagggacgtgtttttatatttttatgcgttattttgtaggtgttttttgttgatttttgtgtgttttggggtttgtttttttggtaggggttgattttgtttgtgatttagatagtttggagggttaggattgaggggagggggcggtggagtgaaggggagggtgggcgttgttggtaagaattataggtaaagagggtgtcgggggtagggaaggtttggaggtttgaggagtagaaagtagatttttgattttttttgggttggtgagtcggggtttagtttagagtgatagggattaaatttgggtttatgtgtcgtgtttagtttggggtttaggtttttttttcgtgagttgagtagatagggagggttttgggggaaggttgtgggtttttgggtggaagagttttgggtgaggtttttgaattggtaagcggggtagcggcggtagggggtttagggaagtggggttagtcgggggtttttaggggttttttagggatatatttgttgttagggtgtggggagtgggaagtgggggacggggtggattttaggatttcgggttgtgtttggttagagtggggaattggacgtttcgtttttggtttagtttttttcggttgtgattttgggggattattgattttattgtgtgtttggagagtttaatttttatttgttagtgggtgatatagaaggtaggaatgtagaaggttttttagaagtttttattggtttgtaaggtagaggttgttttttgttgaggatatatttgttttttttattttttagatcggcggttgtttaaggagtttggtatagttgtacggaggcgtagtatttataggataagtggtggaatgttttggttgtttttggtgtaggtggcgggcggggttggggggttttgtagtttttttggtttcggttttttggataggttttattttttttttatcgtggtttttttggtaggttgtttgttattttaaagttacgttgttttgggtattttgtttttttcggggattggggttggggttggggtagttgtgtttatgggtgtattttttgtgttgggtattgcgttgagtttaatatataggggttcggggaggtttgtgggtgtttaggtcgagatgtgaattttgagtttgtgtaattcgagttttagagtggcggtttttgttttttataagatattgttttgcgagggggttagttttgaagtcggatggttcggttttcgttattacgtggaggttttttgtaggtgtttgtgtagatgttttcgtgcggggatttgtttggttgatggattagggggaaggttttttttacggtgtgaggtagtatcgagggtttcgtgtttagtaggtttattgtcggtagttgggtttggtttgataatcgtggatcggggtgataggttttgattttgtagagtaggattgtggaaaatggatattgatgttgttcggtggatttaggtagggtcgggatgtttgtaggatttacgggataattagaacgattgggtttgattggtatagggatgtggattacggtgtttgttattagtagatataagttgtacgtagtgggtcgtaggcgttttttgggtcggaatatatggacgtttaggtgtggaatggttcggatagtagataataagttttcgtcgtggttatttttgggtgtgggttgtgggttttaatttttttatttttgtttatttgaattttttaattaaaaatatattgttttttaaaaataataaaagattatt

SEQ ID NO: 109 - DNA, 2351 bp, Artificial Sequence
  chemically treated genomic DNA (Homo sapiens)
aatgattttttattatttttaaaaagtaatatatttttaattagaaaatttagatgagtaaaaatgaaaagattaaaatttatagtttatatttaggggtgattacgacgaaggtttgttatttgttgttcgggttattttatatttggacgtttatgtgtttcggtttagggagcgtttgcggtttattgcgtatagtttgtatttgttgatggtaagtatcgtagtttatatttttgtgttagttaggtttagtcgttttaattgtttcgtgggttttgtaaatatttcggttttgtttggatttatcgggtagtattagtgtttattttttatagttttgttttgtagagttagggtttgttatttcggtttacggttattaaattagatttaattgtcgatagtgagtttgttgggtacggagttttcggtgttgttttatatcgtggggagaattttttttttgatttattagttaaataagttttcgtacgggggtatttatataagtatttatagggagtttttacgtggtagcgggggtcgggttattcggttttagggttgattttttcgtagggtaatgttttgtgaggagtagaggtcgttattttgaaattcgagttgtataaatttagggtttatatttcggtttgggtatttatagattttttcgagtttttgtgtgttgagtttagcgtagtgtttagtatagggagtatatttataaatatagttgttttagttttagttttagttttcggaagaggtagggtgtttagggtagcgtgattttgaggtggtaggtagtttgttaaaggggttacgataagagggaggtggagtttgtttaggggatcgaagttaggaaggttatagagttttttagtttcgttcgttatttgtattaaggataattagaatattttattatttgttttgtgggtgttgcgttttcgtgtagttgtattaggttttttgagtagtcgtcgatttgggggatagagggggtaaatgtatttttagtagaaaatagtttttattttgtaggttagtgagaatttttgaaaggttttttgtatttttgttttttgtgttatttattggtaggtagggattaggttttttaggtatatagtaaagttaatggttttttaaggttatagtcgggagaggttgagttagggacggagcgtttagttttttattttgattaagtataattcggaattttggaatttatttcgttttttattttttattttttatattttgatagtaggtatatttttgaaggatttttgaggattttcgattggttttatttttttgggttttttgtcgtcgttgtttcgtttattagtttaggggttttatttaagatttttttatttaagggtttatagtttttttttaagattttttttgtttgtttagtttacggggaagaaatttgaattttaggttgggtacggtatatggatttaggtttggtttttgttattttgggttgggtttcgatttattagtttagggagggttaagggtttattttttgttttttaaatttttaggttttttttgttttcggtattttttttgtttgtggtttttgttagtagcgtttatttttttttttattttatcgttttttttttttagttttggttttttaagttgtttaagttataggtagggttaatttttattaagagagtaggttttagggtatatagaagttagtagaaagtatttgtaggatggcgtatgggggtgtgggagtacgtttttgttatttagtaataggtgggggttttacggggggtatatggtgggattatgatagttgttgtttagattatagcgaggtggtggtaatgttataggtggttttcgttatgttaggaagagatggtgtattttagaaattagcggttttcgtcgggagtttttaggtaggtgttaagtttaggagtaggttcgttagagagaggaggtaagttagaaggaggaggaggtaagttagagggggtggttttagatatcgtttttgatggcgacgttgttttcgtttatagttatatttaagtttagaggtttgtttattttgtaggtttggtagttttaagaatagttatgaagatttatttagtatttattaatttagaatttaaattattagaaggtttttttttggttttttggggttttttatgagatatatttatagtaacgtttttttagtttagggaaggatttttgtgaattttagaaagatatagtggggttgggttttatttttggatagttgttgggatggcggaaggagtagtaatgtattttagttg

SEQ ID NO: 110 - DNA, 6888 bp, Artificial Sequence
  chemically treated genomic DNA (Homo sapiens)
gcgtcgttcgtgggtcgtcggtcggtcgtagttcgttggcgacgagggtattatagttgttttgatcgcgtagattatgtatgtttcggtttcgggaatttattatgtattagaatatattagcgtttgtattttaaaaggttaaattattggtttttagttagggattttcggtaagtggtttgttagtgacgagtgtttgtttatattggtatatagcggagttttttgttttcggtttattcgtttttaggaaagttttggggtgaggcgaaggcgattgaagtaatgtttttttttttagatcgtagttgtttaggggggatatagtacggtattttttatcgaatttttttcgttcgttcgtattttagtttttttttttttagcgatttttttatttttttttttttttttttttttgacgtttgattttagtagtaaaggaggtaaaaaaggtatcgagtcgttagttaaatttgaaaagtgcggtttcgttttttttatagttattggtagtttttcgtggaaggttcgtttttcggggtagttgcggtttcggagtggttgcgtttggcgttcgtcgggcgtggtttcgttttaggttcgggagggtaggttggttgtttcggcgagcggtagagtttttttggatagttttcgtttatttaaatagaagacgtcggcgtcggagcgggttcggatatggcgaggttgcgagtcggttcgagcggcggggttcggtgattttttttttttttttcgtttttttttttttttcgtacgtacgtttcgttcgtttttatttcgtttttatttcgggcgagttcgttcgtagttcggggcgtatattcgtacgcgtatttttttttatttattttcgcgttcgtttttattttcgtagtcgagtttcgttacgcgcgttttgttcgttcgtcggtcgttttcgtcgttttcgtcgttttcgggttttgatggattgaatgaaggttgtttatatcgtttatcgatgttttattaaagatttagaaggttgcgttatgaattcggagttgataatggaaagtttgggtattttgtacgggtcggtcggcggcggtagtggcgggggcggcggcgggggcggcgggggcggcggcgggggttcgggttatgagtaggagttgttggttagttttagtttttattacgcgggtcgcggcgtcgttggttcgttgcggggtttttcgtcgtttttaatcgcgtattaggagttgggtacggcggtagcggcggtagcggcggcgtcgcgttcggttatggttattagtatggtttcgattttggacggcggcgattatcggttcgagttttttatttcgttgtattacgttatgagtatgttttgcgattcgttttcgtttggtatgggtatgagtaatatttatattacgttgatatcgttttagtcgttgttatttatttttatcgtgtttgataagttttattatttttattcgtattattattcgtattattattattattattattattagcgtttgttcggtaacgttagcggtagttttatttttatgcgcgacgagcgcgggttttcggttatgaataatttttatagtttttataaggagatgttcggtatgagttagagtttgttttcgttggtcgttacgtcgttgggtaacgggttaggcggtttttataacgcgtagtagagtttgtttaattacggttcgtcgggttacgataaaatgtttagttttaatttcgacgcgtattatattgttatgttgattcgcggtgagtaatatttgtttcgcggtttgggtattttatttgcggttatgatgtcgtatttgaacggtttgtattattcgggttatatttagttttacgggtcggtgttggtatttagtcgcgagcggttattttcgtttttatcgggttcgtaggtggttacgtcgggttagttggaagaaattaatattaaagaggtggtttagcgtattatagcggagttgaagcgttatagtattttttaggcgatttttgcgtagagggtgttgtgtcggttttaggggatttttttcgatttgtttcggaatttaaaatcgtggagtaaatttaaatttggtagggagatttttcgtaggatgtggaagtggttttaggagttcgagttttagcgtatgttcgttttacgtttggtaggtaaggtcggggttagttaggggttaggttgttgggaagagggtttcgggttcggtgtttgtggtttaagtttgcgcgtcgagttattttttttgatttttttttttttttttttatatacgtttttttttttttcgtttttatttttttttttattttttttttttttttcgttttttttttatttttttttttttttttttttttttttttttattttttttttgtttttgagtttttattgatcgatttttttttattttattcgttttttttttaatgtgttaatttttgttttattttcgatttttttaggtattgggaggcgggatgggggtgtgcgtttttttttaggagttttgtttttttaagatttatagaaattaggatttgtttttatttaaaattttatgtattttaagttttttttagataatatattttaatttttcgggttgattagtttttttgtgtagaggtagttgagaggttttgttttgtagagggaaaagagttttttatttttttatttattatataggtaaatttatttggttattggttgaaggtatagttttgttttcgcggggaatcggcggttaggatataatagcgtttttggagtttatttttggttttggcgttggcgtagggattttttgatcgggtttgaggggttcgggttagttttaatgttattatttatagcgagggtagggtgtaaggttgagaaggttatatttatcgttttgggaggacgtgggagaagagattgaggtggaaagcgttttgttttgtttatcggtcgtttttgtttcggttttagcgtttgttgggatttgttaggatttgtcggggtttcgggagattttgagtattcgtaggaagaggtgttgagaaattaaaaatttaggttagttaatgtatttttgtcgtcggttgtaggtttcgtttttgtattaagcgggcgttgattgtgcgcgtttggcgatcgcggggaggattggcggttcgcgggaggggacgggtagaggcgcgggttatattgttttggagtcggttcggttttttgtgttttttttagcggttaagttgcgaggtatagttttttattgttttaggagtatagaaattttttgtgtgggcggcgggtgcgcgagttagagggaaagatgtagtagttattgcgattggtacgtagttgcgcgtttttgtgcgtacggatttcgcgcggtgtgcgtggcgattgcgttgtttttaggagtaagttacgggtttagaggggtaaaatgtttaggtttttcgttgggaaggatatattatattttatggtaagttagggtgggcgattttttatggatcgggtggaggggggtattttttaggatcggcgggcggtttaggggaataattcgtggtggcgatgatttgtatagcgcgggttttgggatgcgcgcggtttcgagttagtttcgtatagttcgttttcggagttgcgagtttaggtttttattttcgatttttcgggtttttttcgtatcgttgagtttagtttgtggggtgtattcgattaacgttcgatagggttggggaatgtgataggtagtaggtttattcgggtttggggagggggagttttcgttttgatagtatttttttttgtcgtttgttggtggatttttatttttagtcggtaatcgtttcgtagtgttgatttaagaaggtaaagaaaattaggtttttttgtaaagagttttttttaaatcggcggatttcggatattttgagtggatttagaaatttatgtaattttttttttttagtttattttttatttttttttatagttttttttgatttgttgttggttcggggtaagataaagtagttagtagagagcgataataatagcggcgggaaatgaattggagattggttgatagtttttaatattttgttatagattttttcgaatgttttaggttgtttttggtgggttttagtattcgtcggttttttgggtatcggggattagaaggaatttggtagttggttttaggggtatagttaaaggtaggatgatagttatttttttgtttattttagagcgttgtcgtttttttatgtcggtcgcgtaaagaatatagtttttaaaaaatacgtgttttttgtttatataggtttgaaagtgatgaggaaagtaatgtttcgtttattagcgagttttagtttttaaaatgattttaagcgttgttgagatgagaaagcgtggtatttcgggggtttttagttttattcgcgtttatggtgtaagtttgtagggataggttcgggatagtattgtttacgttgttagatttttcgtagaggatcgttgaagttgttttcgtgggagatagaatgttttttttagcgagtggaaaaggtttgttgaggatttcgttttgttcgagtatttaaatgtgtgtttgttttattattttgggttgaaaagggataagagttttagtttttttatttggttattttattagtaattataagtgtgttgagtggttattattatataggaggttttttagtttggggttagtagattagtttttttagatattgatgtagaagttgggattggtaagtaggtattatgtgttcggagcgttaggggataggagtaaatggagaagaaaagcggaggtttttttcgttcggagtatcgatcggaattttcgtcggtacgtcgtagagggttttcgtcgttgggtttcgggggtttaataagtttagtcgtttcgtaggcggttcggtcggatttttagatcggtgtttggaagatatcgtttttgtttttttttcgttaaatttgtttttttttttttttttataggttataggtttttttttttttttattttggtttcgttttcgggttttgttaaatagttaagtaggtcggggtttagggggtttagaatgaagaggtttgatttggttagcgtcggtaaagtttatttttaggcgaggttataatagaggtaggttttttttgtttagtttgtcggtgtagttatagttaagggtggtatttgaaaggaaaagggagaaaatttcggagaaatttagattgttttaacgttagattttagagaaattgattttaaatgtacggattcgttcggaaagggcggttaagtggtaggtggttgtaatttcgttcggtcgggttttcgtagaggttttttaagattagtttttgtagggcggtttttagtaatttgataagaggcggttaagataaatttttgcgggttcgagtatatattttcgggcgttgggttttagagatttttaaattaagtataaataagaagggagtgagagaatttaggttagaatttgtacgggtattttattgaggaaaagcgaggtttcggtggtaggtatgttttttttcgacgttcgaaaatcgagtcgagcgttcgattatatttattgtagaggttttcgtttttagtgagttcggattttttagcggtttgttcggagttggtttttagttttcgtcgtagttcgacgtacggtttttttttggtagtaagtttttagcggttagtttgaagttaattttgtttaggcggtcgagggtttttagttaatttattatgatgtcgtttgggttatttgatgttcgtagcggcgggatacggttcgggtagtgcgtagtggtttttgttaggggtatcgcgtgcgtgtttgtttttcgttgcgtcggggacgtttttgggtgatacgggtcgttgggtattttttaagtcgaggaaacggatttttttcgtagagtttcgcgtttattttttaattttttatttcgtttttcgttgttagggttttcgatttagtttattttttttggcggtttagttagggattagagttggagaggttgaacgtaattcgtgttagtacggaatagacgatatgtttgtttgttagttgtttggatgaataattgaaaagttcgttgtagtttgtgtttcgttaagtttcgggtgtcgggagaatatttttttaatacgtattagggtgggcgggagcgggtagaggaggcgggattcgagggaggagagtgaattcgagtaggagaagtagtttaggtagttaggcgttttcgatgcgagaggttgggtatttatttttattttaggttttttattgtgtggttatgttatttttttaaataaatgtgtatatggagggagatcgatgttgataatgtttagaagattaaaagagtattaatgttggtaataataacgtaaacgtgtggatttagattttattgatttggaatttgattcggcgcgtttttagtaagttcgacggcgcgttttttttagtagagcgtttattagcgttacggtttcgcggttttttagcggtgtcgtttcgttagttttgcgcgggttttttcgtttgatcgtagtttttttttcgcgaggttttagttcgttttattttttcgaggttttttttttttttcgcggggttttttgttttttgtattttttttttcgatttttgtattattcgtttttgtgcgtatatatcgttatttgcgttttcggcgattcgtttgggcggttgggttcgcgaagttaatgcgttgaacggtgttcg

SEQ ID NO: 111 - DNA, 6888 bp, Artificial Sequence
  chemically treated genomic DNA (Homo sapiens)
cgggtatcgtttagcgtattggtttcgcggatttagtcgtttaggcggatcgtcggaagcgtaagtagcggtgtgtgcgtataggggcgggtggtgtagaggtcgggggagggggtgtagagggtagagagtttcgcgagaggaggagaaaatttcggggaagtaaggcgggttggggtttcgcgggggaggagttgcggttagacgggagaattcgcgtagagttggcgaagcggtatcgttggaaaatcgcggggtcgtggcgttggtgagcgttttgttgggaagagcgcgtcgtcgggtttattggaaacgcgtcggattaagttttagattaatgaaatttgggtttatacgtttacgttattgttgttagtattaatgtttttttaattttttaaatattattagtatcgatttttttttatatatatatttgtttgagaaagtgatataattatatagtggaaagtttggaataaaaataaatgtttagtttttcgtatcgagggcgtttggttgtttgggttgttttttttgttcgggtttatttttttttttcgggtttcgttttttttgttcgttttcgtttattttgatgcgtgttgggaaggtgttttttcggtattcgggatttgacgaagtatagattgtagcgaattttttaattatttatttaagtagttagtaggtaaatatatcgtttgtttcgtattggtacgggttgcgtttagtttttttagttttgatttttaattaaatcgttaggagaggtgggttgagtcgggagttttagtagcgagaaacgaggtgggaggttggggggtgggcgcgagattttgcgaagggggttcgttttttcggtttgggaggtgtttagcggttcgtgttatttaaggacgttttcggcgtagcgggagataagtacgtacgcggtgtttttagtaggagttattgcgtattgttcgggtcgtgtttcgtcgttgcgggtattaggtggtttaggcgatattatggtgggttggttaagggttttcggtcgtttgaatagaattggttttagattggtcgttgggagtttgttgttaggagagggtcgtgcgtcggattacggcggggattggagattagtttcgggtaggtcgttgggggattcgggtttattggaggcggaaatttttgtagtaaatgtagtcgggcgttcggttcgattttcgggcgtcggaagaaaatatgtttgttatcgaggtttcgtttttttttagtgggatgttcgtgtaagttttagtttgggtttttttattttttttttgtttgtgtttggtttagaggtttttggggtttaacgttcgagagtgtgtgttcgaattcgtagaaatttgttttggtcgttttttgttaggttgttgaaaatcgttttgtaagggttggttttggggaatttttgcgaaggttcgatcgggcggggttgtaattatttgttatttagtcgtttttttcgaacgaattcgtgtatttggagttaatttttttgaaatttaacgttggggtaatttaaattttttcgaagtttttttttttttttttttaagtgttatttttggttgtgattatatcggtaggttgggtaggaaggatttgtttttgttgtgatttcgtttaagggtgagttttgtcggcgttggttaaattagatttttttattttgagttttttaaatttcggtttgtttggttgtttggtaggattcgggggcggggttaaaatgagagagaaagggaatttataatttatgagagaaagagaagaggtaggtttggcgggaggggggtagggacggtgttttttaggtatcggtttgagagttcggtcgagtcgtttgcggagcggttgggtttgttaaattttcggggtttaacggcgagggttttttgcggcgtatcggcggggatttcgatcgatatttcgggcggagaaagttttcgttttttttttttatttgtttttgttttttagcgtttcgagtatataatatttatttattagttttagtttttgtattagtgtttgaagagattgatttattgattttaaattgaaaagttttttatgtaataataattatttaatatatttgtagttgttgataaaatggttagataaaaaggttaaagtttttgtttttttttaatttagggtaataaaatagatatatatttgaatgttcgagtaaagcggggtttttagtaggttttttttattcgttggaggaggtattttgttttttacgaaggtagttttagcgattttttgcggaaaatttagtagcgtgggtagtgttgtttcgggtttgtttttgtagatttgtattatgggcgcgggtggggttgaggattttcgggatgttacgtttttttattttagtaacgtttgggattattttaaaagttgaaattcgttaataggcgaagtattattttttttattatttttagatttatatgggtagaaggtacgtgttttttaaaagttgtgttttttgcgcgatcggtatgagggggcggtagcgttttgagatgagtaggagaatagttgttattttgtttttaattgtatttttaagattagttgttaagttttttttggttttcggtgtttaagaagtcggcgggtattaaaatttattagagatagtttgggatattcggggggatttatgataaaatgttaagaattgttagttagtttttagtttatttttcgtcgttattattatcgttttttattggttgttttattttgtttcgaattaatagtaaattagagaaaattgtaggagaggatgaaaaataaattaaaggagaaagattatataaatttttaaatttatttaaagtattcggagttcgtcgatttgggggaggttttttgtagggaaatttagttttttttatttttttagattaatattgcggggcgattatcgattgggaataggaatttattagtagacggtaaaggaaaatgttgttaaagcggaaattttttttttttaagttcgggtgaatttgttgtttgttatattttttagttttgtcgggcgttggtcgagtgtattttataagttgggtttagcggtgcgaggaaagttcgggggatcgggggtggaaatttgagttcgtagtttcggaagcgagttgtgcgaggttggttcggaatcgcgcgtattttaagattcgcgttatgtaaattatcgttattacgaattgtttttttagatcgttcgtcgattttgaaagatatttttttttattcgatttatgggaagtcgtttattttggtttgttatagggtatagtgtgttttttttagcgggggatttggatattttgtttttttgggttcgtggtttgtttttaggggtagcgtagtcgttacgtatatcgcgcggggttcgtgcgtataaaagcgcgtaattgcgtgttagtcgtagtaattattgtatttttttttttagttcgcgtattcgtcgtttatataggaggtttttgtgtttttagaataatagagggttgtatttcgtagtttggtcgttagaggaggtataaagagtcgagtcggttttagaataatgtaattcgcgtttttattcgttttttttcgcgggtcgttagtttttttcgcggtcgttaggcgcgtataattagcgttcgtttaatgtaaaggcggagtttgtagtcggcggtagggatgtattaattaatttgaatttttaattttttagtatttttttttgcgagtgtttagggtttttcggagtttcggtaaattttggtaaattttagtaaacgttgggatcggggtaaggacggtcggtgagtaaggtaaagcgttttttattttagtttttttttttacgtttttttaaagcggtgaatgtgatttttttaattttatattttgttttcgttgtaggtagtgatattggagttggttcgagttttttaagttcggttagaaagtttttgcgttaacgttaaggttagagatgggttttaggagcgttgttgtattttggtcgtcggtttttcgcgggggtaaggttgtgtttttagttaatgattaaataagtttgtttatatggtgggtgggagagtagagagtttttttttttttgtagagtaaagttttttaattgtttttgtatagggagattagttagttcggaaaattgaaatgtgttgtttaaaagagatttgaagtgtatggggttttgaataagggtaggttttggtttttgtgggttttggaaagatagggtttttagaggaaaacgtatatttttatttcgttttttagtatttgggaagatcggaaatagggtaaaggttggtatattgaggggagggcgaatgaaatgggggggggtcggttaatgaaagtttagggataaggagagagtaagaaagaaaaagaaaagggagaagggaaagtaggggaagagcggaagagaaagagaaaatggaagaagaaataaaaacgagaagaaagaggacgtgtataggaaagagaaggaaagaattaagagaagtgattcggcgcgtagatttgggttataagtatcggattcggagttttttttttagtagtttggtttttggttagtttcggttttatttgttaggcgtaaggcggatatgcgttggaattcgggtttttgaagttatttttatattttgcggaaggtttttttgttagatttgagtttattttacggttttggatttcggagtaggtcggagagagttttttgagatcggtatagtattttttgcgtaaagatcgtttgggggatattgtagcgttttagtttcgttgtgatgcgttgggttatttttttggtgttgattttttttagttggttcgacgtggttatttgcgagttcgatgaggacgagggtggtcgttcgcgattgggtgttagtatcggttcgtgagattgagtgtggttcgggtggtgtaggtcgtttaggtgcgatattatggtcgtaggtggggtgtttaggtcgcgggataggtgttgtttatcgcgggttagtatggtagtgtggtgcgcgtcgaagttggggttgagtattttgtcgtggttcggcggatcgtagttgggtagattttgttgcgcgttgtggaggtcgtttagttcgttgtttagcggcgtggcggttagcggggataggttttggtttatgtcgggtatttttttgtagggattgtagaggttgtttatggtcgggagttcgcgttcgtcgcgtatgagggtgaagttgtcgttgacgttgtcggataggcgttggtggtggtggtggtggtggtggtgcggatggtggtgcgggtgagggtggtggaatttgttagatacggtggagatgggtggtagcggttggagcggtgttagcgtggtgtaggtgttgtttatgtttatgttaggcggagacgagtcgtaggatatgtttatggcgtggtgtagcgggatggagagttcgggtcggtagtcgtcgtcgtttaggatcgaggttatgttggtgattatggtcgagcgcgacgtcgtcgttgtcgtcgttgtcgtcgtgtttagtttttggtgcgcggttggaggcggcggagggtttcgtagcgagttagcggcgtcgcggttcgcgtggtgggggttggggttggttagtagtttttgtttatggttcgggttttcgtcgtcgttttcgtcgttttcgtcgtcgttttcgttattgtcgtcgtcggtcggttcgtgtaaagtgtttagattttttattgttagtttcgggtttatggcgtagttttttaggtttttggtgaggtatcgataggcggtgtaggtagtttttatttagtttattagggttcgggggcggcgggggcggcgggggcggtcggcgggcgggtaaggcgcgcgtggcggggttcggttgcgggagtgggggcgggcgcgggagtgagtggagaggagtgcgcgtgcgggtgtgcgtttcgggttgcgggcgggttcgttcggggtgggggcggggtgggggcggacggggcgtgcgtgcgggagaggggaggggacggggagggagggagggattatcgggtttcgtcgttcgggtcggttcgtagtttcgttatgttcgagttcgtttcggcgtcgacgttttttgtttgggtgagcgggagttgtttagaagggttttgtcgttcgtcggggtagttaatttattttttcggatttggggcggggttacgttcgacgggcgttaagcgtaattatttcgaggtcgtagttgtttcgggaggcgggttttttacgggaagttattagtggttgtggagggggcggggtcgtattttttaggtttggttgacggttcggtgttttttttattttttttgttattggaattaaacgttaaggagagggagggaggagaaggtgggggggtcgttggggagagggaggttggagtgcgagcgagcgagagagattcggtgaaagatgtcgtgttgtgttttttttgagtagttgcgatttgggggaaggggtattgttttaatcgttttcgttttattttaaagtttttttggaggcgagtaagtcgggagtaaaagatttcgttatgtgttagtatagataaatattcgttattaataagttatttatcgagagtttttagttgggagttaatagtttagttttttaaaatgtaggcgttaatgtattttaatgtatggtaaattttcgaggtcgggatatgtataatttacgcggttagagtaattgtagtgttttcgtcgttagcgagttgcggtcggtcggcggtttacgggcggcgt

SEQ ID NO: 112 - DNA, 2473 bp, Artificial Sequence
  chemically treated genomic DNA (Homo sapiens)
ggatatttttgcgcgtgtacgaacgtatttgtacgcgcgttagttttttagtgcgggtgtattttttttatttttttaggtatgcgttgcgggggaagggtcggtttaaaggtatgagttagaggaaggattgtatgtcgtgaaggttttttttattttacgttgggtttttgtatttgtgttttagtttttttgtcgaatttattaatgagatgttttttttgtagggatcggtttcgttattgagattttaggtttttgttagttattttttttttttatatttttagttattttcggtaggttttagtttcggttttatttgtgttttcgttttagtcgtagttatgttgtatatcgagggttacgttttttttcgggcggtgggttagggtaagttacgtttggttcgtttgtttttggagggaggcgtttacgtgaatgagggtgatgcgtagggggagattgcgttaatggtagtttgtcgggttcgttacgacgatttttagaataaggtacgtatggtacgttattttttggagtaaggcgcggattttaatatcgtagatcgattagggcgtacggcgtttatgtacgtttgcgtcgggggtgggggcgtcgcggtggtttcgttgttttttgtttacggcgtagattttttagttcgagattacgcgggcgtttcggtttttgtttacgttttggatcgcggggatcgcgagatttttgttatattgttggacgtttgtaaggttaagggtacggaggttattattattattatcgatatttcgtttttaggtattaagaagattcggtagtattttaattttttattatttttaggggtggaggattttgttttcgttttttttagttcggggttttgtacgtcgttttcggaaatttaattgtagatcgttggaggaggagggcgtgggatgttattttttcgcgtttaggaagaagaggagaagcgggacgtatttgaattttttttttttaagtttttcgatgatttattttttttcgagtcgttttttaaattattacgttattttttaaaattatttaaaaggtttaatttcgagttttggggtttagtggtttttttttaattagttttatttattgaagggagatcggggatcgagcgtttgattgtcgaatttaatggtttgattttgatcggtcgatttcgtttttttcgacgttatagtatcgaaggttttgaggattcgtttttatgggcggagaaagtgattagcgggggttttttttttcgtcgaaatatagtattagaagtttaggagtttggtttttttttagggttgaggtagaaattgagtcgtatggagttagtggagttggatatttttggatatttttgttttgattcgtttgagtttagtcgtttgtttttggagcgtcgtcgatatagcgttttttcgttgattttttttttagtcggttcggtttttttttcgcgttagttttaggagagtttgttaggggtagtattttcgttaagcggaaggaggcggagttcggggttgttggagcggaggggttcggggacgttgtttttggattatatttcgtaaacgcggtcgggttttttatttttttttaacgttagtttttatttttttatttttgatattcgtttataattcggaggtcgggcgttttcgttgtttgtttttttttatgtcggggcgttaggtttttttaggattaagcgtaaattggtgagacgttattttatgtagattgagtagattcgtttgttggggggtttttagagtttaggtgggtttggggagttagggcgttgagaggagtgagaggagttaaggagggtggggattaggattttaatgggataggtgggagaattagtttatatatatattacgaataaagggattttttgtatgtgtttatgggtgtatagtgtatttatatatggttaaatatgtgtttataagtatagtatttttattagtaagaaagaataagtattttatttattgggtatatatatatatgtatttatgttttggttattttatatgtatatgggattatttgtgtatttataggtatagtatattaataaatatatagggttagggttttaaatttttttgtatttgtttagaagtagtagggaatttttatttatgggtagttttcgatgtttttgtttttttgtagaagtaattttttgttttttatgtatgttttgaaatatagtttattatgattttgtatatttttttcgtggatattttagtttattttgtaggttttgtttttttttttaggtttggttttttatttatattttgtttttaattttaattattttttaggatattttttttattttttttgggggtttttgtagtaatttttagttttagttttgttgttgtttttattgtttttaattttattttttaatttt

SEQ ID NO: 113 - DNA, 2473 bp, Artificial Sequence
  chemically treated genomic DNA (Homo sapiens)
gaagttgagaagtgaagttgagagtagtaaagatagtagtagaattgaggttgggggttgttgtaggaatttttaagaagagtgaaaaagatattttgaaaagtggttggggttagaagtagggtgtgaataaggagttaggtttggagaaagaagtaagatttgtagaatgggttgggatgtttacggagagagtgtgtaaaattatgataggttgtgttttagggtatatatggaaagtaagggattgtttttgtaggagggtaaagatatcggagattgtttataagtaagggttttttattgtttttgaataaatgtaagagagtttgggattttagttttgtgtgtttattgatatgttgtgtttgtaggtatataagtaattttatatgtatgtgaaatgattagggtatgaatatatgtgtgtatatatttagtaaatagagtatttatttttttttgttaataagagtattgtgtttatggatatatgtttaattatgtgtgggtgtattgtgtatttatgagtatatgtaagagatttttttgttcgtggtgtgtgtgtgagttggtttttttatttattttattaaggttttaatttttattttttttggttttttttattttttttagcgttttggttttttaggtttatttagattttggaagttttttagtaggcggatttgtttagtttgtatggagtggcgttttattaatttgcgtttggttttgggagagtttggcgtttcggtataaggaggggtaggtaacgaaggcgttcgattttcgggttgtgggcgaatgttagggatgggagggtggggattgacgttgagagggggtaggaaattcggtcgcgtttgcgagatgtggtttaggagtaacgttttcgagttttttcgttttagtagtttcggatttcgttttttttcgtttagcggagatattgtttttggtagatttttttgggattggcgcggagagggagtcgagtcggttggagggagggttaacggggaggcgttgtatcggcggcgttttagggataggcggttggatttaggcgagttagggtaaaggtgtttaggggtgtttagttttattggttttatgcggtttagtttttgttttagttttgaagggggattagatttttgagtttttggtgttgtgtttcggcgagagagaggattttcgttagttatttttttcgtttatgggggcgggtttttagggttttcggtgttgtgacgtcgggaaagacggggtcgatcggttagggttaggttattgaattcggtagttaagcgttcgattttcggtttttttttagtgggtgggattggttgaggaggggttattaggttttagggttcggagttgagttttttgagtggttttgggggatggcgtggtggtttggggagcggttcggaaggggatgggttatcggggggtttaggaagagggaatttaaatacgtttcgtttttttttttttttttgggcgcgaggggataatattttacgttttttttttttagcggtttgtagttggattttcgaaggcgacgtgtagaatttcgggttaggagaggcgggagtagggttttttatttttggggatggtggagaattgagatattgtcgggtttttttggtgtttgagggcgaggtatcggtggtgatgatgatgattttcgtatttttggttttgtaggcgtttagtagtgtggtaagggtttcgcggttttcgcggtttagggcgtggataagagtcgaggcgttcgcgtgatttcggattgaggggtttgcgtcgtgggtaaggagtagcgaggttatcgcggcgtttttattttcggcgtaagcgtgtatgagcgtcgtgcgttttaatcggtttgcgatattggggttcgcgttttgttttaggaggtagcgtattatgcgtgttttgttttgggggtcgtcgtagcgggttcgataggttgttattagcgtagtttttttttgcgtattatttttatttacgtaggcgtttttttttagaagtaaacgggttaagcgtagtttattttgatttatcgttcgaagaagagcgtggttttcggtgtgtaatatagttgcggttggggcgagggtatagatggagtcgggattgagatttgtcgaggatgattaggggtatggggagggggagtggttggtagaggtttgaggttttagtgacgaagtcgatttttgtaagagagatattttattgatagattcggtaggaaaattgaggtatagatgtagggatttagcgtggggtggaggagatttttacggtatatagttttttttttaatttatgtttttgagtcggtttttttttcgtagcgtatgtttgaggaggtgggaagggtgtattcgtattgaaggattagcgcgcgtgtaaatgcgttcgtgtacgcgtagggatgttt

SEQ ID NO: 114 - DNA, 2425 bp, Artificial Sequence
  chemically treated genomic DNA (Homo sapiens)
gtttagttggaattagttaatttgtaaatatagtttttattttaaaaattgtgaaatgatgtttttttaaatggaaaaagtattaaggagaagaaaattgatttagttatagggtttttgggggaaaatttttagtattatttttttttttaattatagtaaaatatggtgggatataagaattaaatatttattgagtattttttttgcgtttattataattttattttaatttttgtaaatgtgattgtgatttcgtgagttagattatagaatttttgttgatagttataattggtaggtatagaaagcgtaaagatggagtttggaatggaatttggtttgtttgattttaagttttggatttattgtaatatattataattgttagttttgtaaaatgttttttttttttttttatttatttttatatttaaattaaaatttagtaaattaaattttgagtagtagaaaaaattttagtaaaggtttttttatttttgaagaattttttatataaggatatttttttttgtttttttttttacgtagaattttattaaaggttagtaagaatgggttgttgtgtttttttttaaattttatatagaagtttttaatttcgaggtaaatatttgaatggaataaatgagtatgatttgggggttaaggtaatttttaagtgtgtgtatgtgtgtgtttgttttaaggtataataaagtttagagattaaggtcgagttaaaaaataaatgaggataaattaatgaggataaattagttcgttgaggtgcggttagagtagtagtaattgtggttgtttttttgataaaggttgtgaagacggtacgttttatttttattcgtgtattttttttgatattttatttttttatgaagttttagaggtgttttaaaattgtgttaggaaatatatagagataagaaaaggtaaatggttttgatttagtgttttagggaagaggttggaaaggaaacgcggcgcgagtggggtgggagagggggtttgtggttttgtttttgttcgggttgaagattgagtaaggtagggtttttttttttgcggatgggttttttttttattttattttttatttattttcggtttcgcgtgtacgcgcgagatagtttagtgggtttatagataacgattattagagattaaagaaggaaagttagcgagtttgaatataggcgtttcgtgtggaaatgtttaaggagatcgttagaagtgcgtaagtcggagtcggttagagttttttttttatcgagagggggagttcggcgttttcggtcgggagcgattcggagtttttagtttcgcgttttagttgtcgttagcgttagttttggattcggcggattaggaagaggagggaggggggagagagcgcgaagagggaggggatcgaagttggagggtttcgagtttagcgtcgtgttggcgtagagaaattttttttttcggtttcggagacggcgtttcggtcgtgtcggagtggagatcgttaggttcggaggaatcggtagttttttacgtttttgttcgaagtttgattcgattgttttttttagtgaggtacggagatttatttaggtttttttttggttgcgaatttaggttttttttaggtagcgtggaatcgtttagaagttgatatttcgaggggcggtgggggtggatagtttcggttattagtgttcgggaaggagggcgcggggttgcgcgtagtcgttggttagtaggttgtaaaaaattaggatagttaaatgtttagggagtcgtttagtattaaaggaggttaagatttgttgacgtttgttatggtagcgtttgagaaatgattgggggagtttagcgaggtcggggacgtagcggttttcgggttttagaaatttttttagttttttgtggtaattttggttcggcggcggggggtcggtgagtaggaattggagggaggcggtggggaaatcgtggattcgttcggttgagggtgcgtggattagattgggttgagtaggtaagttatcgtcgggttatagcgaggcgatttaggagcgaatttttagggtagttttttttttgttggcgttgggagagaatgtgggtatgggggtggggaggcgcgaagtttcgaggtcgggtcgcggatattttaaagtttagagttgggagggtttaaaggaaggggcggcgtttatatggttatttttttgttgcgcgggttaagtagttttttttggagggcgtaaggcgcggcgggggtgatgagtttttgggttttcgtttcgattgttaaattcgtttggtcgggtttattttttcgtggttttattcgttatacggattagaattcggagtaggtagttttttttattttgaggtttttgcggttgtcgcg

SEQ ID NO: 115 - DNA, 2425 bp, Artificial Sequence
  chemically treated genomic DNA (Homo sapiens)
cgcggtagtcgtaggagttttagaatagagagaattgtttgtttcggattttgattcgtgtggcgagtgaggttacgagaaggtggattcggttaagcgaatttagtagtcggagcgagaatttaagggtttattattttcgtcgcgttttgcgttttttagaagaagttatttgattcgcgtagtagaagggtaattatgtggacgtcgtttttttttttgggtttttttagttttgagttttaaagtattcgcggttcggtttcggagtttcgcgtttttttatttttatgtttatatttttttttagcgttaataaaagggaggttgttttggaagttcgtttttgggtcgtttcgttgtgattcgacgatgatttgtttgtttagtttagtttgatttacgtatttttagtcggacggatttacggtttttttatcgtttttttttagtttttgtttatcggtttttcgtcgtcggattaaagttattataaaaggttaaggaggtttttggagttcggagatcgttgcgttttcgatttcgttggatttttttagttattttttaagcgttgttatagtaggcgttaataggttttagttttttttagtgttggacgattttttgagtatttagttgttttaattttttataatttgttggttagcggttacgcgtagtttcgcgttttttttttcgggtattggtggtcggagttgtttatttttatcgtttttcgggatattagtttttaagcgattttacgttatttggagggagtttgggttcgtagttagggaagagtttagataaattttcgtattttattgagagaggtagtcgggttaggtttcgggtaggggcgtggagagttgtcggttttttcgagtttggcgatttttatttcggtacggtcggggcgtcgttttcgaggtcgagagggaaagtttttttacgttaatacggcgttggattcgggattttttagtttcggtttttttttttttcgcgttttttttttttttttttttttttttaattcgtcgaatttaaaattggcgttggcggtagttgggacgcggggttggggatttcgggtcgttttcggtcgggaacgtcgggttttttttttcggtgagaaggaaattttagtcgatttcggtttgcgtatttttggcggtttttttggatatttttatacgggacgtttgtgtttaagttcgttgattttttttttttaatttttgatggtcgttatttgtgggtttattggattatttcgcgcgtgtacgcggaatcggaggtgggtggagggtggaatgagagagaaatttattcgtagaaggaggggttttattttatttagtttttagttcggatagaagtaaaattataggtttttttttttattttattcgcgtcgcgttttttttttagttttttttttgagatattagattaggattatttgtttttttttatttttgtgtgttttttaatataattttaaaatatttttgaggttttatagaggggtaaagtgttaaaagaaatatacgaataagagtaaaacgtgtcgtttttatagtttttattaagaaagtagttatagttgttgttgttttggtcgtattttagcggattggtttgtttttattggtttgtttttatttgttttttaattcggttttaatttttggattttgttatgttttaaaatagatatatatatatatatatttgaaaattgttttaatttttagattatatttatttgttttatttagatgtttatttcggaattaaggatttttgtataggatttgagagaaaatataatagtttatttttattgatttttggtaaagttttgcgtgggaaagggagtaagaaggagtatttttatataagaagttttttaaggatgagaggatttttattaaaattttttttgttgtttagaatttagtttattaaattttagtttgagtgtgaaaatagatgagaaaaggaaaaaggtattttgtaaagttagtagttataatgtattatagtggatttagggtttagagttagataggttagattttattttaaattttatttttacgttttttgtgtttattaattataattgttaataggaattttataatttagtttacggagttatagttatatttataggagttaaaatagagttgtgataggcgtagagaaaatatttaataaatatttggtttttatattttattatgttttattgtaattaggagagagggtggtgttagaaatttttttttaaagattttgtaattgaattagtttttttttttttaatgttttttttatttaaaaaggtattattttataatttttgaaatggaaattatgtttatagattaattagttttagttgaat

SEQ ID NO: 116 - DNA, 3954 bp, Artificial Sequence
  chemically treated genomic DNA (Homo sapiens)
gggtcgtagtcggagaggaataggaatcgtagtggggacgttttggttttcgggtttatagtattcgggacggacgcgtagtagcgcgggtcgggaattgggtattagggcgggatgggtgagaggttttaagggataaggtagggagaagcgtagcggggtgcggggaatcgtacgttttttttttgtttttgttttttatttcgaggcggtagggcgggcgggcgcggtttcgggggtgggcgggttgggcggggcggaggcggggtcgtagtattggttttatttagtttttttcgttcgtagttagagcgagtcgagtcgcggttagtttcggcgggtagggggggcgttggagcgtagcgtagcgtagttttattagttcgtaaagcggatcgagttggaagtcgagcgttgtcgcgggaggcgggcgatgggggtaggtgttatcggtcgcgttatggacgggtcgcgtttgttgttgttgttgtttttgggggtgagtgttagtcggagggggttcgttttttttttcgggattagaatttcgagaagagtcgggcgtcgttattaaggaaatagaatagagtattggggttttagatattgagggtgggtggtgggaaaggatttttgatgtcgggattacgaaggagggtttagggttttcggagcgtagaggcgattttttagggtggagatgagggtaagatcggagtacggatgtcggtttttaggtatcgtagggggcggtgggggagttgggaggggttttttaagagggggtatggggtttttcgatgtttaggtttttcggaagaggatattcgaatgtcgggatttcgaagggattttttttttagtatttcggtttttggagagtcgtgggatagaattaaggcgagagaaggagggggaattggacggggattagagatgagaggggcgagttgggttggggcggggagttcgggacgacgggatggaataatggaggaggtcggagggattggaggtagaggggattcggtaaggataatggggatcggttagataatgggggggaggggcgtcggagggagaggttggggagcgggagagaggttgagaagtgggttagggagggtagaagaggggcgacggcgagggcggtagagagatggaagtagaaggaaaggagatagagcggggcgcggattttgaagtggtcggggtttcgtttgttcgttgagggatagtgagacgagaagagagagtagaggtttggatatttttagcgtttgttttcgcgtttttgttcgcggttttttttagtttcggaattggggttgcggatttaaggttgggaggggagtgtttatttcgtcggggcgaattcgttttcggggtttttttacggtcggcgggttttttcgacgcgcgtgtttttacggtttgaagtagcgtagcggatcgcgagggacggagcgggtgtgtttttattcgggttggcggtggttacgtttcggggtgtagagcgtcggggcgtattaggcggggattttttttggtcgcgcgtagttttggttacgtaggcgggaggcggtaggtagggggcgttgcggggcgaggtaagtgtagttcgtcgttgtttgtttgcgagtttggggttgcgcgtcgttttttatttagttgcgcgattcgagcgtcgcgtttatcgcgtttcgtgggttttcgcgtttcgaagggtcgggattcggtttgagttttttttggttttcggtgtaagtcgttgggtatttaacgagacgggggcgttcggacgtttcggattttgtagcgcggtatttcgggttatcgattcggtaaaggtcggcgggtttttcgggtggttcgacgagattgttagatgtggtttgttttatggttatgaatcgaatgttttggaaggtttggtaacggaggaggcgtttttatttttttcgttagtattttttattagagtattgcgttttaaatttcggttttatagatacggagattgaggttttgagagtttaaacgatttggttaagattttatagtaagttgggttagagtcgtggttagatttttcgatttgatttttagttcggtatttttttatttttttagggggtagtcgttgttttagttcggggttacggttgcgttttttagtagggcggggggggttgatattgtttttagagttcgtcggcggtagagtttgcgggtgaggtgggtagagattttgttcgggtgcgggttttagttcgaaagtttagttttagttttttggagttgttaggatttgtggttgcgttcggggatttgggagcgatcgcgggtacgtttgttgattaacgtcgttggttagagacgttgtttagacgcgggtgggcgagcgtagattaggagagcggggaggagggatcggattttagaggggtaacgatttgggtttcgggtttgggtaagagcgagggttttcgcgcgaagatttaaggaaggaggggagttgggcgtggaggatttgggcgtttgggaaggtgtatttcgataggaatttgtcgtttgtagtttttgcggttttcgttttcgtttcggcgcgcggttgttcggtttgggatggttgtgcgcggttcgagtttttttttgggtcgcggtgagagagagagggttgaaattagagcgcgtttcggcgggtcggttggcgggtcgcgtcggtaatggaggtattttgttatttagacgtttgtaattagagtcgtcgggttggttaatgcgtttaatagggatggaacgagggtagtaaatgggcgtgcgtgagcggtcgggttgagttgggtggatggtggatggggaggtagtttcgcgggggacgggtttttatcgtattgttttagtttagtttggtttaagcgtttcgttttttttttgggggatcgcgtggggaggcgggaataatcgtatgtgttgagtttttattaagtgttttgtatttttttggtagttttttttgaattatttaatttttataaggttttagtaaggtgaatttagttatttttatttcgtagttgaggaaatagaattttttagatttttaggttcgagattaggtttttttagtgagttagtggtggcgtttttgttggaatttaggatgtttggtttgggatgtttttttttttatatatgttaggttttttttcgttttttattttttagattatggaaggagtcgtggttttgagagattaaatcgtgttttatgtttttggttttatatatttagatttgagttttttttttatacgtagaggttttgtttttttttaagtttttatgttatattattttgggtaattagtttttttttttttaattttttttttatttaaagggagtgaggggtatgtgttagtgttttttttgggtttgtatcgattttaaaaggttttttaggtgtttgaaaattttttttattttatggcggtgattacggttttatttatttaagagttttttgttgaagttgttggaatggttagggttgattatattgaaatattcgtatggttttaaatatttttaattgtttcgttgttttttttttttttttaattaaaaaaaatgaaaatttttaaaagttaatttatttaaggatttttttattttagttttttgtaagttttgaaatggttaaaataaaaagattataagcgtttttaaaaatgagatgaaattattttgttaaatgtgaaatgattaagtgtaatatatataaattttagggaaatttatttgttatttttataaattaatttttttggatttgattttggagtaattagtttgaatgttagttatttttttttatttggttaaattttttttttttgtttggggtttttttaagatgagatgtttttttgataattaatatttatt

SEQ ID NO: 117 - DNA, 3954 bp, Artificial Sequence
  chemically treated genomic DNA (Homo sapiens)
aataaatgttagttattaaagaagtattttattttaaggagattttaggtaggaggggagagtttagttaagtagggaggggtgattaatatttaggttaattgttttaaaattagatttaaaaggattaatttatagggatgatagataaatttttttgaaatttgtatgtgttatatttagttattttatatttgatagaatgattttattttatttttaagaacgtttgtaatttttttgttttggttattttaaggtttataaggaattaaggtggaaggatttttagatgaattgatttttaagaatttttattttttttaattagagaaaagagagaaatagcgaaatagttgaaagtatttgaaattatacgaatgttttagtataattagttttggttattttaatagttttagtaaagagtttttaagtgaatggggtcgtggttatcgttatgggatgggagagatttttaaatatttggagggttttttgaggtcgatgtaaatttaggggaggtattggtatatattttttattttttttggataggggaggagttgggaggaaaggagttaattatttaagataatgtagtatagagatttgagagggggtagggtttttgcgtgtggagaaggggtttagatttaaatgtgtggggttaaaggtatagggtacgatttaattttttagagttacgattttttttatgatttagaaggtagggggcgggagggagtttggtatatgtaggaaagagaatattttaggttaagtattttgggttttaataaagacgttattattgatttattgggggagtttggtttcgggtttgaaagtttagaaggttttgtttttttaattgcgaagtgggaataattaaatttattttgttaggattttataaggattaaataatttaagagaaattattagggaagtgtaaggtatttagtaggaatttagtatatgcgattattttcgtttttttacgcggttttttagggaagaagcgaggcgtttgagttagattgggttggaatagtgcggtaggggttcgtttttcgcggagttgtttttttatttattatttatttagtttagttcggtcgtttacgtacgtttatttgttgttttcgttttatttttattaggcgtattagttagttcggcggttttggttatagacgtttgaatgataaagtgtttttattatcggcgcggttcgttagtcgattcgtcgggacgcgttttggttttagtttttttttttttatcgcggtttaggaagaaattcggatcgcgtatagttattttagatcgagtagtcgcgcgtcgaggcggaggcgggagtcgtaggggttgtagacggtaggtttttgtcggggtatatttttttaagcgtttaggttttttacgtttagtttttttttttttttgggttttcgcgcggggattttcgtttttgtttagattcggagtttaagtcgttgtttttttgggattcggtttttttttttcgtttttttggtttacgttcgtttattcgcgtttgagtagcgtttttaattagcggcgttagttagtagacgtgttcgcggtcgtttttaaattttcggacgtagttataggttttgatagttttagggaattggggttgagttttcgggttggggttcgtattcggatagaatttttgtttattttattcgtaggttttatcgtcgacggattttggggatagtgttaatttttttcgttttgttgggaaacgtagtcgtgatttcgagttgggatagcggttgttttttgaaaaggtgggggagtatcgagttgggaattaggtcggggagtttagttacgattttggtttaatttgttgtgagattttggttaagtcgtttaaatttttagagttttagttttcgtatttgtaaagtcggaatttggggcgtagtgttttgatgaaagatgttggcggggagagtgaagacgtttttttcgttgttagattttttagggtattcggtttatggttataaagtaggttatatttgataatttcgtcggattattcggaggattcgtcgatttttgtcgagtcggtggttcgggatatcgcgttatagaattcgaggcgttcgggcgttttcgtttcgttaggtgtttagcggtttgtatcgagagttaggagaggtttagatcggatttcgatttttcgaggcgcgggagtttacggagcgcggtgggcgcggcgttcgggtcgcgtagttaggtggggagcggcgcgtagttttagattcgtaggtaggtagcggcggattgtatttgtttcgtttcgtagcgttttttgtttgtcgtttttcgtttgcgtagttagagttgcgcgcggttaggaagggttttcgtttagtgcgtttcggcgttttgtatttcgagacgtagttatcgttagttcgggtaggggtatattcgtttcgtttttcgcgattcgttgcgttgttttaagtcgtgagaatacgcgcgtcggaggagttcgtcggtcgtgggggaatttcgggagcgggttcgtttcggcgaagtgggtattttttttttagttttagattcgtagttttaatttcgggattgggagaggtcgcgagtaggagcgcggggataggcgttggaaatgtttaagtttttgtttttttttttcgttttattgttttttagcgggtaggcgggatttcgattattttagggttcgcgtttcgttttgttttttttttttttgtttttatttttttgtcgttttcgtcgtcgttttttttttgttttttttaatttattttttaatttttttttcgttttttaattttttttttcgacgttttttttttttattgtttggtcggtttttattgtttttgtcgggttttttttgtttttagttttttcgattttttttattgttttatttcgtcgtttcgggtttttcgttttagtttagttcgttttttttatttttagttttcgtttagttttttttttttttttcgttttggttttgttttacgattttttagagatcgagatgttgaggggaaagttttttcgggatttcggtattcgagtgttttttttcgaagaatttgggtatcggagagttttatgtttttttttgaaagattttttttagtttttttatcgttttttgcggtatttgaggatcggtattcgtgtttcggttttgtttttatttttattttggagagtcgtttttgcgtttcgggaattttagattttttttcgtggtttcggtattagaggtttttttttattatttatttttagtatttgggattttaatgttttgttttgtttttttggtggcggcgttcggtttttttcggagttttgatttcgggaaagggagcgggtttttttcggttaatatttatttttagaagtagtaatagtagtaggcgcggttcgtttatggcgcggtcggtggtatttgtttttatcgttcgtttttcgcggtagcgttcgatttttagttcggttcgttttgcggattgatggggttgcgttgcgttgcgttttagcgttttttttgttcgtcggagttggtcgcggttcggttcgttttggttgcgggcgggagaggttgggtgaagttagtgttgcggtttcgttttcgtttcgtttagttcgtttattttcggaatcgcgttcgttcgttttgtcgtttcggggtgggaagtagaggtaaagggagggcgtgcggtttttcgtatttcgttgcgtttttttttgttttgttttttagagttttttatttatttcgttttggtatttagttttcggttcgcgttattgcgcgttcgtttcggatgttgtgggttcggggattagggcgtttttattgcggtttttgttttttttcggttgcggttt

SEQ ID NO: 118 - DNA, 2821 bp, Artificial Sequence
  chemically treated genomic DNA (Homo sapiens)
tttaggggataatatttaggtatgttaacggagtttaaaatgttaaggaaattatattataattttgtttagtatattataggttgttaaatcgaaatgttatgttagttaggagtgtagtaatttttattttttggttttatttaattaggaagttttagtagagcgaagtttgttaagcgttcgtcgttagaatttgaaggaattcgagcgagtaagaagagtgtttgatttattttatagaagtttgtttagaaatggaggagttagcgtttattgaagtcggtttcgttttcggttcgtttatatggagtttgattagttttagttatgtttatttcggtttgggagattcgtaaagtgtttttttttttaatttttttgtattattttgaagtttagggaagtaaagagaggggtatatttggattgtaaaattaatgttttttgtcgtttaggagagaagggaatgagagagagagagagatagatagatagagagagagagagagagagagagagagagagagagagagagagagaaattttattgaaatttagtttttttagaatttgtgtgatttggtttttaacgggagattagtgcgattttatggtatttttgttaggaattagcgatttttttgtagttattatttgatttattgttttttcgtttatttttttttataaagttattttttttttattttagtaagatttttttttttaatgatgataaagtttttgttttagtgttttttttaggattggtgtttttttaaaatagtgaatttagaaaattatttcgtttaatattttttaaaattttcgtagttttaatgtaagcgtaagtatgtaaaggttttttgttatatttgtattttttgtttattttagaattattttttattttcgggtttgtaatagttttttttgtttttttggatagaggtgggtggtattaggggtttagggtagtaggaggtgaggggttgaggaggcgcgttagggtaggttggtttgtgttggatacgcgtgtttttttgcggagttaaagggtcggggacgggggttttggatttattagagtaattttagtcggtgggcgtttggtagttatttaaggaggtagggaaagtagcgagttttatcgggcgggttacgatgagtagtatgacgggtagtagtagtagttagtaaaagttttcgtaaagtgtttagttgttgtattgtcgcggggatttttatagtattatgattagttcgtgtaattttgtagtagtaaacggttttcgaggaatataggatcgcgggggtcgggtagcgggttattgagtatttcgcggacggcggtagtagaggcggcggcggtggtagtggtattcggcggggaagtagtagttaaattcgcgtatgatttcgagagttttagtaatatttagggattgggtttagtttcggagcgagagggtcgttcgttgagaagttgcgtcggagacgcgggaagttgttgttataaggagggagttttgggaagtcggaggataggaggagacgggagtttaggggtagacgagtggagttcgaggaggtagggtggagggagagttaaggcgtttcgtagttcggtagtcgtttttcgagttttgtcgttcgtatttttttggcgtttgggaagtagtaggtttttagttcgttcggggttacgtgggaagaggtagtcgggttttgattggtggagtaggatgtaggtttcgggagggaggggtcgacgaggaggtgtaaggatgtaaggaggaggcggtcgcggaagttatagatgggttcgttcgttaggcgttggttcgagtggggttaggcggggatggtttaaatgagaagttcgggttttagggtgggttattcgtatatttatatattattcgttttatttttcgttttaggacgttttttatcgaaggcggggttcggattagcgtttttttttcgcgcgtgatttcgggtcgcgagtgcgggtcgcggttgggtggcgttttttcgagttggagatggtgggggcggaggtgttagaggagtagtagtagtagggtagagaggggcgagtcggcgcgggagagggcgttttgttggcgatcggcgttttagcgtgcgggagcgcgtcgtttaggttgtagggggatgtaggttgggaatgtcgcggcggagaggttagggacgtttttttagggatttataggaaagagggtgagaggcgatggtgttagaatcgtttttgtcgatttggaagtaatagtagtattttttataagagcgtgtaattttaaggttgttcgtcgaggtagtttagttatttcggtaggcgttttttttttttttttttttttttttttttttttttaggtttttcgtagtttcgatttagtttaagcgttcgtaggtttgaatttttttttttattattcgtttttttttagttcgtagtttattagtgtgtttatttgggaggtgcggttagatgtgtttggaaggttagattggtcgggataagtggtttgagagaaagagaaaggtttttttgtatacgtcgcgggtgggttgtcgggagtatcggtcgggtagcggcgttcgggaaggggagagcgggttttatttgttggtttaggtagtgattttgcgttttttattcgggtttttgtcggatggtcggtgatttggggcgacgagagaaggtttaattcggtaggagtttttggttttgcgcgttttttttattttttttagcgggaagggtaaacggtatagcgggattcgtttttcg

SEQ ID NO: 119 - DNA, 2821 bp, Artificial Sequence
  chemically treated genomic DNA (Homo sapiens)
cggaaggcgggtttcgttatgtcgtttgtttttttcgttggagagaatgaaagaaacgcgtagagttagagatttttgtcgagttagattttttttcgtcgttttaggttatcggttattcggtaaagattcgagtaaggaacgtagggttattgtttgggttaataaatggagttcgttttttttttttcggacgtcgttgttcggtcgatgttttcggtaatttattcgcggcgtatgtagaggagttttttttttttttttagattatttgtttcgattaatttgattttttaaatatatttgatcgtattttttaggtggatatattaataggttacgggttggagaggagcgggtgatgaggagagggatttaaatttgcgaacgtttgggttgggtcggagttgcggggggtttgggaggagagaggggagaagagagaaggaaggagagcgtttgtcgggatggttgagttgtttcggcgagtagttttggggttgtacgtttttgtgggagatgttgttgttgtttttaggtcggtaagagcggttttaatattatcgttttttatttttttttttgtaaatttttagagaaacgtttttggttttttcgtcgcgatatttttagtttgtatttttttatagtttaggcggcgcgttttcgtacgttggagcgtcggtcgttagtaggacgttttttttcgcgtcgattcgtttttttttgttttgttgttgttgtttttttgatattttcgtttttattatttttagttcggagagacgttatttagtcgcggttcgtattcgcggttcggggttacgcgcggaagaggggcgttagttcggatttcgttttcggtagggggcgttttggagcggagagtgaggcgaatggtatatgagtgtgcgggtagtttattttgaagttcgagttttttatttgagttattttcgtttagttttattcgggttagcgtttggcgagcgagtttatttgtggttttcgcggtcgttttttttttgtatttttgtattttttcgtcgatttttttttttcgggatttgtattttgttttattaattagagttcgattgtttttttttacgtgatttcgggcgggttgaggatttgttgttttttaaacgttagagggatgcgggcggtagagttcgagaggcggttgtcgggttgcggggcgttttgattttttttttattttgttttttcgggttttattcgtttgtttttggattttcgtttttttttgtttttcggttttttagagttttttttttatggtagtagtttttcgcgttttcggcgtagttttttagcggacgattttttcgtttcggggttgagtttagtttttggatgttgttgaaattttcgagattatgcgcgggtttggttgttgttttttcgtcgggtgttattgttatcgtcgtcgtttttgttgtcgtcgttcgcgggatgtttagtagttcgttgttcggttttcgcgattttgtgtttttcggaagtcgtttgttgttgtagagttgtacgaattagttatggtgttgtgggagttttcgcggtagtgtagtagttggatattttgcgagggtttttgttggttgttgttgttgttcgttatgttatttatcgtagttcgttcggtgaagttcgttgttttttttatttttttaagtgattgttaaacgtttatcggttggaattgttttggtaagtttagaattttcgttttcgattttttaatttcgtagaagaatacgcgtatttagtatagattagtttattttagcgcgtttttttagttttttattttttattgttttagatttttaatattatttatttttatttagagaaataaggggaattgttgtaggttcgggggtgaggggtggttttgggatgggtagaaagtgtaggtgtagtaggaaatttttgtatgtttgcgtttatattggagttgcgaggattttgagaaatattaaacgggatggttttttgggtttattgttttgaaagagtattaattttaggggaaatattgaaatagaagttttgttattattaaagaaaaaagttttattaggatgaggaagaaataattttatgagaaagaatgagcgagaaagtaataaattaaatggtgattgtaggggaatcgttgatttttggtaaaggtgttatgaggtcgtattggtttttcgttgaagattaggttatatagattttagaggagttgggttttaatagaatttttttttttttttttttttttttttttttttttttttttttttttttatttatttattttttttttttttttattttttttttttttaggcggtaaaagatattggttttgtagtttagatatgtttttttttttgtttttttaagttttaaggtagtataggggagttgagaaaaagaatattttgcgggttttttaggtcggagtgggtatgattgaggttggttaggttttatgtaggcgagtcgagggcggaatcgattttagtgggcgttgatttttttatttttggataggtttttgtggagtgggttaggtattttttttgttcgttcgggtttttttagattttgacggcgaacgtttggtaggtttcgttttgttgaagttttttaattaaatagggttagaggatgggagttgttgtatttttagttggtatagtatttcggtttgatagtttgtagtatattgggtagaattgtggtgtaatttttttggtattttaaatttcgttaatatgtttgggtattgttttttagg

SEQ ID NO: 120 - DNA, 2818 bp, Artificial Sequence
  chemically treated genomic DNA (Homo sapiens)
gaggtgggggcgttaacgataggcgtttagtaagtgtttttgaggtaattgtcgggttgttttggatttggtgaattttttcggggtttagtaaaggcggacgttgatcgggttaaggagtgggatttgtagtgttggattatttttttttaagcgtagaagtgtcgtgttcgtcggtttttaatagggtaagaggtttttttcgtcgtgtagagcgtagcgtttgcggcggggatagtagaggcgggacgggcgttacggagttttcgggttttcgcgcggttatttatttggttttagttattcgttgaaaaaggggcggacggtttttcgggattcgagtcgatatcgcgcgcggcgtcgcggggtaatttgaagtcgtgtgcgtgcgtgtgcgtttacgtaggggtttatttagcggttacgggtttttgaagattcgggtgggaagtgcggttcgggaaagcgtaagcgtttttatggtaacgagggcggacggcgttagagcgagtcgttttcggaagtgacgtgcggaaggggtgttcgggacgaagttatggttttggaggcggcgggagggtcgtcggaggaaacgttgttattgtggaaacggtaatgttgttaggcgacgcgtaggaggcgggggtcgaggtcgggcggtttttcgcggatttttcgagtttatagtttttaggttgtggaatcggagttgttatcgttcgagattttaaagtaaagtttagttttcggcgcggaagcggagggattttaggaattgtagttcgcggggtgggcgcggttttcgttttcggttagtttgtttggtttgcgtttgcgcgggttttcgtcgtttgggtttttagggattgtggtttcggcggtatgttttttgtttttttttgaagcgggagaagattcggtagaggcgttttgttcgttgtagtcgcgcgggtggaggaggtagagtttgaggtgtgatttcgattaagtttgacgtttttgtttttttagggagtaagttcggttgaaggtttacgtcgtagatcgggatatcgaggcgtggtagcgagatttcgttttttcgggtttgtagagggtcgggggcgttgacgtgtttttcgtgaaaggggatagtgttcgcgtttgtgtttttttggtggtgtttagtttttttgagttcgaggtaatttgggaggacgtcgagttcgaggcgggtttttcggtgggttcgggcgtgcggttttcgggatagggagtagtgtaagcgtagaattcggtttttcgttttgtaggatgttattaatagtttggggagttggtcgggcgcggtggtttacgtttgtaattttagtattttgggaggttgaggcgggggaattatttgaggtcgggagttcgagattagtttgattaatatggagaaattcggtttttattaaaaatataaaattagacgggtgtggtggtatatatttgtaattttagttattcggaaggttgaggcgggagaatcgtttgaattcgggaggcggaggttgcggtgagttaatattacgttattgtattttagtttcggtaataagagcgaaattttattttaaaaaaaaaaaaaaaaaaaaaaagtttggggagttttggaagggaaaaaaaggtaaaaattaagggaattttgtgattattaagaattagtttatgagttttatttttaagtttgattgttattttgggttttttattttagtgatttgtttattacgtttttagttgtttaagttggagatttgtatttttttgggttttttcgtttttttcgcgtttagttgtatattagttcgtttttattttgttttttaaatgtcgttggaatttgtttttttgtttgttttttttttgttttttttttggttgtgttattattatttttgtgggtttttgagtagtatttttatgggtgttttggtttaaatgtttttttttagtggttttttttttatattgttagtagattaatttttttaaaaagtaagtattttttttaaaagtaataagttttttttttttttttttttttttttttttttttttttttttttttttttttttttttttttttgtttttttttttttttttttttttttttttattttgtgtttaggttgaagtgtagtggtataattttggtttattgttaagatttgattttaattttttggatttaagtgatttttttattttagtttgagtagttaggattataggtgtgagttattatattcggtttatttttttattttttgtagagataggattttattatgttgtttagggtggtttttagtttttgggtttaagggatttttttattttggtttttttaagtgttgagattataggtgggaattattatatttagtttataagtttttttagaatattgaagtgttttttttatgattttatggtgaataaagtttattttggttggtatggttttaaggttcgttatgatttgttttttgcgtaatttaatatgacgttggaggtttagtttttattattatttttagttttttttattttttatagtttattgtgagttttttacgtgtttgttacgttgtatttggcggtttgatttttgtagtaatgttttttttggaagggtttttatttggttaattattatttatttttttgggtttagtttagatatgacgttttttattaagtttttttttattttataagacgaggatttgttttttagtattatgttttagttcgtttgggttgttgtaatagaatattttagattgg

SEQ ID NO: 121 - DNA, 2818 bp, Artificial Sequence
  chemically treated genomic DNA (Homo sapiens)
ttagtttaaggtattttattatagtagtttaaacggattaagatatggtgttgagggataagttttcgttttgtgggatgagagggagtttagtggaggacgttatgtttaaattgagtttaaagagatgagtagtagttagttagatggaaatttttttagaagaaatattattgtaaaggttaggtcgttaaatatagcgtagtaaatacgtgagggatttatagtgggttgtaggaggtgggaagaattgagaatagtggtgagggttgagtttttagcgttatattaaattacgtaggggataggttatgacgggttttgaagttatgttaattagagtgaattttatttattatgaggttatgagaagggtattttaatgttttaagaggatttgtgggttgggtgtggtggtttttatttgtaattttagtatttggggaggttaaggtaggaggattttttgagtttaggagttggagattattttgggtaatatagtgagattttgtttttataaaaaataaaaaaataagtcgggtgtagtggtttatatttgtggttttagttatttaggttaaggtgggaggattatttgagtttaggaggttgagattagattttgatagtgagttaagattatgttattgtattttagtttgggtatagagtgggggaaggggaaaggaaggaaagagagatagagagaggaaggaagggaggaaggaaggaaggaaggaagggagggagggagggagggaggggatttgttgtttttgaggaaaatatttgttttttaggaaaattggtttgttggtagtatggaaaagaaattattgaggaggaatatttgagttagggtatttatgaaaatgttgtttaggaatttataggagtgatggtggtatagttagggaaggagtagaggggaaatagataaggggatagattttagcgatatttaagaggtagaataaaagcgagttagtgtgtaattggacgcgagaggaacggaggggtttaggaggatgtagatttttagtttgggtaattgggagcgtggtggataggttattgagatgaagaatttaagataataattagatttgaagataaagtttatgagttgatttttaatagttatagaatttttttaatttttgttttttttttttttttaagattttttagattttttttttttttttttttttttgagatggagtttcgtttttgttgtcgaggttggagtgtaatggcgtgatgttggtttatcgtaattttcgtttttcgggtttaagcgattttttcgttttagtttttcgagtagttgggattataggtatatgttattatattcgtttaattttgtatttttagtagagatcgggtttttttatgttggttaggttggtttcgaattttcgattttaggtgattttttcgttttagttttttaaagtgttgggattgtaggcgtgagttatcgcgttcggttaattttttagattattaatgatattttataaaacgagaagtcgggttttacgtttgtattgttttttgtttcggagatcgtacgttcgagtttatcgaggggttcgtttcgagttcggcgtttttttaggttatttcgagtttagggaagttgagtattattagggaagtataagcgcggatattgtttttttttacgaaggatacgttaacgttttcgattttttgtagattcgagaaggcggggtttcgttgttacgtttcggtgtttcggtttacgacgtgggtttttagtcgagtttgttttttaggaggatagaagcgttaaatttggtcggggttatattttagattttgttttttttattcgcgcggttgtagcggatagagcgtttttgtcgggttttttttcgttttaagggaaagtaagggatatatcgtcgaggttatagtttttaggagtttaggcggcggagattcgcgtaagcgtaggttagataaattggtcggaagcgagaatcgcgtttatttcgcggattataatttttgagattttttcgttttcgcgtcggaaattgggttttgttttggagtttcgggcggtggtagtttcgattttatagtttgaagattatgagttcggagggttcgcgaagggtcgttcggtttcggttttcgttttttgcgcgtcgtttgatagtattatcgtttttatagtgatagcgtttttttcggcggttttttcgtcgtttttagggttatggtttcgtttcgggtatttttttcgtacgttattttcggaagcgattcgttttgacgtcgttcgttttcgttgttatggagacgtttgcgttttttcgggtcgtattttttattcgggtttttagaagttcgtggtcgttgggtgagtttttgcgtgaacgtatacgtacgtatacggttttaggttgtttcgcggcgtcgcgcgcgatatcggttcggatttcgggaggtcgttcgttttttttttagcggatagttgaggttaggtaagtgatcgcgcgaggattcgggaatttcgtgacgttcgtttcgtttttgttgttttcgtcgtaagcgttgcgttttgtacggcgagaggggttttttgttttgttgagagtcggcgggtacggtatttttgcgtttggaaaagggtggtttagtattgtaggttttattttttggttcggttagcgttcgtttttgttgaatttcgaaaggatttattaggtttaggatagttcggtagttgttttaggagtatttattgagcgtttgtcgttgacgtttttatttt

SEQ ID NO: 122 - DNA, 2308 bp, Artificial Sequence
  chemically treated genomic DNA (Homo sapiens)
taagggttaagtaatgatgtataaacggggtttattgtttaaatttatagaaagtaaaacgtggaaaattagtaattttaattgatagtgtatatttaaagaatttatatcggtcgggcgcggtggtttacgtttgtaattttagtattttgggaggtcgaggcgggaggattatttgaggttaagagatcgagattagtttgattaatatggtgaaatttcgtttttattgaaaatataaaaaaattagttaggcgtggtggtatatgtttgtagttttagttattcgggagggtgaggtaggagaattgtttgaatttaggagatagaggttgtagtgagtcgagatcgcgttattgtattcgtttgggagatagagcgagatttcgttttaaaataaaaaataaataaaaagaatttatttaatagaattaagtattaatataataaatacgaagaattttagatttttggtttttaaaaaatatataaagatgatatttttttaaaatatttttataaaatatattgagattgtgatgttttatattgattgtatgaaaataatgaaaaagaattagtattgttttattataaaagttttattaatgtaaatttataaatttttttttaaatattttgagttaattttaattttatgatagaaatttattatttttagtaaaaatagttggtatttgggaaattaaaggtttaaaaattaagaatagtaattaaagaaatttgataaaatagtttttttaaaatttttatttatattataaggggaaattttgattacgtttttttttttttattaatcgtagaatttaatattaaggattatataattttatattttttttcgagaaaaagtaaaggttttgtgttgtagtaataacgtaagatatggagggaagttttatttaagatttttttgtttgttttttttttaaagttattttagaatattagggagggttgagaggtaaggtatgaagggcgtaatatttaatatgagtaacgcgtgtgatgtatttggttaaaatgtatatagaggatttgtttttgtttttagatagaagtttttcgttttgtagttatgagggttaattgttgaggttttatagttttttttttttttatattcggatcgttacgttttttatttattatttcgatgtagaggtagatttaggatttttgtatttgttaaggatttttcggtaagtttacggggcgggagtggttataagacggagttcgtttggttttggttttttcggtttatataagtttgttttttttttaatttttaatttttatagttttttatttttttattttcgatttattttgcgttatcgacgtttttggttttcgtttgtagtaagtttatttttattattatttttcgtataaaagtttgtatttattaggttaaagaggggaattaacgtttgtaggaatcgttttatcgaatcgtttggtcgcgttttttgttagattttatttgtcgttgcggatcgtatataattattttcggtatgtttcgcgtacgtattattttttttatttcgtttttttttcgtttaaatacgtgattttttttcgttttcgtttacgtttattttcgtttttttatttttttttaggaaggaggagggagttgggggtgttaaaagcgtagcgatttttttttttttttcgttttcgtttttgtatttttcgttataatgtttttcgggtcgttagcgtttcgacgttttttgggaaaatagtttatttttttttttttttttttttttgtttttaattaattagttattcgttagagagggatatgcgtagtgagtgtttttcgttttttttattcgaatttttttttttttttaagtagagagattttagtagtagtagtagttgatgatgaagagagaggtagtggtagagggggggtattttttatttttatttttaaagggataggatattaattttattttattttaattttgaatttaggggggtggggggaaggcggttgagtttttttttttattttttagttttgagttttgagagggggattgagtttgagagaggagaaggagttttttttttttcgaaaatttttatttacgatttttatttttttatttttttaattcgtttttttttttttattttttttttttttggtcgtgagaggaggagagaaagaaattaaaagttttttagtaatatagattttttgttgttgttgttgttgttgttgttgttgttgttgttgttgttgttattgttg

SEQ ID NO: 123 - DNA, 2308 bp, Artificial Sequence
  chemically treated genomic DNA (Homo sapiens)
tagtagtagtagtagtagtagtaatagtagtagtagtagtaatagtagtagtaaagggtttgtgttgttaagaggtttttggttttttttttttttttttttacggttaaagaggaggagggtggagggagggaggcgagttggaggggtgagggggtaggagtcgtggatgggggttttcgaagaagaagaaattttttttttttttttaggtttaattttttttttagggtttagggttggagggtgggggaaggaatttagtcgttttttttttatttttttgaatttaaggttgaagtggggtagaattagtgttttgtttttttaaaaatagaaataaaaggtgttttttttttgttattgtttttttttttattattagttgttgttgttgttggggtttttttgtttgggggggagggggggttcgggtagaagagacgggaggtatttattgcgtatgtttttttttgacgggtggttggttggttgaaggtaggaggagggggaggggaggaaatgagttatttttttagaaggcgtcgaggcgttagcgattcggaagatattgtagcgggaggtataggagcgggggcggggaggaggaggaagtcgttacgtttttaatatttttagttttttttttttttttaagggaaagtggaggaacggaagtgggcgtggacggagacgaaaggaggttacgtgtttgggcgggagaggggcggggtgggagaggtagtgcgtgcgcggggtatgtcgggagtggttgtgtacggttcgtagcggtaggtgaagtttagtagaggacgcggttaggcgattcggtgaagcgatttttgtaggcgttggtttttttttttgatttggtaaatgtaggtttttatgcgagaggtaatggtgggggtaaatttgttgtaaacgaaggttaggggcgtcggtggcgtaaggtgaatcgaaagtgggaggatggaaggttgtggagattgggaattgggaagggggtaggtttgtataggtcgggaaggttaggattaggcgagtttcgttttgtggttattttcgtttcgtgagtttgtcgaggaatttttgataagtgtagggattttgagtttatttttgtatcggggtagtaggtgaggagcgtgacggttcgagtgtaagagagaagggaattgtgaagttttagtaattgatttttatgattgtaggacggaggatttttatttagggatagagataagttttttgtatgtattttgattagatgtattatacgcgttgtttatattggatattgcgttttttatgttttattttttaattttttttggtattttggagtggttttggggaaggagtaggtagggaagttttgagtggagtttttttttatgttttgcgttgttgttataatataaagtttttgttttttttcggagagggatgtgggattgtgtagtttttaatgttgagttttacgattgatgaaggagaagggacgtgattaaagtttttttttatagtgtagatgagagttttaaaaggattgttttgttaagtttttttggttattatttttagtttttgagtttttggttttttaaatgttagttgtttttgttgaaaataatgaatttttattataaaattagaattaatttaaaatatttaagaaaggatttataaatttatattagtaaagtttttatagtgaaatagtgttggtttttttttattgtttttatataattaatataaagtattatagttttaatatgttttgtaaagatattttgaaggaatattatttttgtatgttttttaaaaattaagaatttaaaatttttcgtatttattatgttggtatttaattttgttgggtgggttttttttgtttgttttttgttttgagacggagtttcgttttgttttttagacgagtgtagtggcgcgatttcggtttattgtaatttttgttttttgggtttaagtagtttttttgttttattttttcgagtagttgaaattataggtatgtgttattacgtttggttaatttttttgtgtttttagtagggacggggttttattatgttggttaggttggtttcgattttttgattttaaatgattttttcgtttcggttttttaaagtgttgggattataggcgtgagttatcgcgttcggtcggtgtaggttttttaggtgtatattattagttaaagttattaattttttacgttttgttttttgtaagtttgggtagtggatttcgtttatgtattattgtttagttttta

SEQ ID NO: 124 - DNA, 2441 bp, Artificial Sequence
  chemically treated genomic DNA (Homo sapiens)
ttgatatggttttgatgttagaggagaaatatggtttgggggtttttgttaatttaggttttttaggtttttattatcgtggggtttttggtattacgttttttagtatttttgatgttggttttgattcggaaacgttgcgtgtgtttaggtttttggtggagagagaagtagtttttgagggatttgtttttgagagggttttatttagggagtgatcgatgtttaggcgtggttaggtttattgttttttgtttttgtttttttttgtttgtgttttggtggttgaggatttagtaggtttttttatgtttgttttttttatgttgagtgagttgggcggtcggggttcgaggtgtgattaggtagttttgatttttatatgttttagaagggttggtatttagttagggagtcgtcgttttttttgtatggagtaaaagtaaacgtttttttttatttgttaggtttttgttggagttttttttacgtagtgatagaaagagttatcgtgggtgttttttttagcgagtgtttaaagatgatggtggggtgggtgggtttggggttgatttttttttttagtttttttgaggggtttatggttggtgataagtgagcggcggtgtttgggtatcggttggttgggggattttgattagtgtggttttaggatttttattttgtatttagtttgtattaggtagcgtttagttgtttttacgtttattttggttaaatttgttgttttaggtgatttagattgcggggggataggtaatggggatgagattgggttttatagtttttttattgtagtagtatagttttcgggagttgtcgagacgtatatatggtttatttagattcgagttaatttttatttaggatagtttcgagatttacgtttttcggaagtttgtgaagttttgcgttacggtgtggtaagaggatagttagttagatttgtttagtttattttagggtcgcgtgggggtggtagttgtaaaatatatgatttttattttgatagtgtttttttaaaaaattaaagtcgtatttcgtttttttggttagtaagaaatttaaaagggaaatagtaagtgtttggtttttcggttacgtttttttgttttcgtttttatttttaaatttacgataagtaggggagatcgttttcgttttaggttagtgtttgatttatataattcgttagttttatttgtttagtttcggtttttttgtttagggagtttgtggaatcggaaaagttttcggttcgtgggcgaaacgttaggtgcgttggtttcgtcgttttttttttagttttgttttcgtttcgcgtggttttcgtgtcgtttttttttttttttttgttggtagtggaatggacgttgtaggcggaattaacgtcgttgttgcgttttgtaatcgcgtttcgcgtatgttttttggtttcgtgtttcgtttttttattttgcgggttcgagttttttgggttgagttttttggtttttttgggttttttttgtgttttagggagtaggtagggggattagtatataattatttggagttttcgtggtttaggtagatttagtcgaaattttgtgtgcgttggtgtagaaggtggaggttatttcggagttattcggatcgtgtttttttttttagaggggtgaggggattttgtgtggttatttatttttaatttggaggtaggtatgggagtaaatgtggggtatatagaggtttagaaaagtatttcgggtttattgttcgggtcgtgttcgtttttttattttttttttattttttcgtggtttttaggtatttcgtatttattttattttttttttttttttaggagttcggttaggtaggtcggggtttttcgaaaggagtattgacgagcgttgtgttttttaatttggttttgtggggatagagtaggggttttcgtagtttgattttcgttttttagaatttgggtatttttttttttttttagttttgttgattttgtttgtttttagtgagggaagaatagtggtttttagttagggtgttcgttagaattatttggagtaggttagtttttagaggttcgggtagggtatagtttttaatagtttagttttttttggtttaggacgtttttgatcgtgtttttcgtttttggtatggttttgttttgttttcgtttttagtttttgtttgttattaattttttattttttatttggggttaggcgggattgaaagttagggaggggttggttgaggttagggttggggcggtttttggtagatgttttcgtgttcgttattttaggtattagcgtgggtatttgggtatttagtttcgtgttggagttgatggttgaggtagggagggtatcggtgttgttagggagtttttggttattttttgagggtgg

SEQ ID NO: 125 - DNA, 2441 bp, Artificial Sequence
  chemically treated genomic DNA (Homo sapiens)
ttatttttagagggtggttaagagttttttggtagtatcgatgttttttttgttttagttattagttttagtacggggttggatgtttaaatgtttacgttggtgtttgggatgacgggtacgagggtatttgttaagaatcgttttagttttggttttaattagtttttttttggtttttagtttcgtttggttttaggtggagagtgaagggttagtgatagataggagttgggagcgggggtagagtaaagttatgttagaggcgagagatacggttaggggcgttttggattagggagagttgagttgttgggagttgtgttttgttcgggtttttgggggttgatttgttttaggtggttttaacgggtattttggttaagagttattgttttttttttattgggagtagatagaattaataaggttgaggaagaaggaaaatgtttaggttttggggaacggaagttagattgcgggggtttttgttttgtttttataaaattaggttgaggggtataacgttcgttagtgtttttttcgggagatttcggtttgtttgatcgagtttttggaaggaaggggaaagtgagatgggtgcgggatgtttggagattacggggaggtgggggagaaatgggggagcgggtacggttcgggtaatgagttcgggatgtttttttggatttttgtgtattttatatttgtttttatatttgtttttaagttaagggtaaataattatatagaatttttttatttttttagaaaggaaaatacggttcgggtggtttcggagtggtttttattttttatattaacgtatatagggtttcggttgggtttgtttgggttacggaggttttaggtggttgtgtgttggtttttttgtttgttttttggggtataagggaagtttaaggaaattaaaaagtttagtttaaggagttcgaattcgtagggtaaaggagcgggatacggggttaagaagtatgcgcggggcgcgattgtaaaacgtagtagcgacgttagtttcgtttgtaacgtttattttattgttagtaagaaaaaaaagggaaacggtacgggggttacgcggggcggaggtaaagttgaggggagggcggcggggttagcgtatttggcgtttcgtttacggatcgagagttttttcggttttataaattttttgggtagggaggtcgggattgggtaagtggagttgacgggttatatgaattagatattagtttggggcggaaacgattttttttatttgtcgtgggtttaaaaatgagggcgggggtaaaaaaacgtagtcggaggattagatatttattgttttttttttaggttttttgttggttagggaggcggggtgcggttttgattttttaaagggatattgttaagataaaaattatatgttttataattattatttttacgcggttttggagtgggttggataggtttgattggttgtttttttgttatatcgtggcgtagaattttataagttttcgggggacgtgaatttcgggattgttttaagtgagggttgattcgggtttgggtgggttatgtgtgcgtttcggtagttttcgggagttgtgttgttgtagtggggaggttgtggagtttaattttatttttattgtttgttttttcgtagtttgggttatttggggtaatagatttggttaaggtggacgtgagggtagttgaacgttgtttaatgtaggttgggtgtagggtggagattttgaagttatattggttaaagttttttagttagtcggtgtttaggtatcgtcgtttatttattattaattatgaattttttaagagggttggggagaagagttagttttagatttatttattttattattatttttaggtattcgttggagagaatatttacggtggttttttttgttattacgtggaaggggttttaataggaatttggtaggtgaggaggagcgtttgtttttgttttatgtagagaggacggcggttttttggttgggtgttagtttttttggggtatgtggaggttagagttgtttggttatatttcggatttcggtcgtttagtttatttagtataagagggataaatatggagggatttattggatttttagttattagaatataaatagggaggggtaaaaataagggataataaatttagttacgtttgagtatcgattattttttaggtgaaatttttttagaggtaaattttttaggggttgtttttttttttattaaaaatttgagtatacgtagcgttttcgaattaaagttaatattaaaagtgttggagagcgtggtgttaggagttttacgatggtaggggtttagagggtttgggttgatagggatttttaagttatgttttttttttagtattaagattatgttag

SEQ ID NO: 126 - DNA, 2818 bp, Artificial Sequence; identical to SEQ ID NO: 120
  chemically treated genomic DNA (Homo sapiens)

SEQ ID NO: 127 - DNA, 2818 bp, Artificial Sequence; identical to SEQ ID NO: 121
  chemically treated genomic DNA (Homo sapiens)

SEQ ID NO: 128 - DNA, 2476 bp, Artificial Sequence
  chemically treated genomic DNA (Homo sapiens)
aattattaggaggttgggggaaaagaggggaaaaacgggtaaggaaggttgtaaatgttaagatgttaaataggaatttaatcgaagttcgaagtgaaatatagttttttttggtttaattgttatgtaaataatttttaagtatttttagatgtaaagaaaaatagttattgtgtataggcgttagttgaatgttcgagagttggatgaatggggaagatttgttatatatttagtggtgggtggattttattaggttgtagtttttatatagtttttttttgttgtattgtagaggcgttatttttttcgttttaatttttatttaattcgatttttttatttgtattttaaaaaaaagatttttcggattttttttagtattttgtgtttttaggggaattaaattagagtttttagagttgttagggaagaggtcgcgttttaattagataaacgtttttttggatgtataggatagagttcgtgtttttttattattcgttattgttttttttagacgtatattttatttttcgttttatttttttttcgttaaggattttatagtttagtatagaattaagtttcggaggtgattcgagggtgggaagtagaggggtttcgaggtttcgttagaagtttcggtagcgtttttgtttttttttaggcggacgcgtagtttcgggaagggagtcgggcgggagtttcggtggcgtattgagattaacgcggttcggtttacggcgagggcggggtgtcgcggtttttgttttcgcggattttttgttttttagatagagtttagggtgcgagcgaattttcgggacgtttagatttggggaaggcgcggggtggttatgggttttcgattttttttatttttcgtaagttatataaaagggagacgcggatatgtataaagtttgtttgtggaaggcggtgcgcgatttcgacgtcggttcgggttagggtcgtatttaggttgtcgtcgttagtagtcgcgaaaagaggttggagtaaggaagggggatgggggtgagagaggaaggtgaaacgaggcggagaacgtagggaaaagcgaggggtttttagttttttgggttgtttcgattttttttttttttttttagggtttaagagaaaggaaagggtaacgatttaagagcgaaggattggttttagggacgttgcgttttcggttttttttacgtgttttttttttttttttttttgtttgaatgtttttcgtttttttcgattttcgtttttaaggtagggattaagtcggggtttgggtttagggtcgttttttatttttttcgtttcgggttggcgcggaattagggagattagcgtttcgttcgtttttttttagcgggtcggagcgcgattttttggggtagggttgggtcgaaagcggggatgcgttggacgttcgtaagcgggggcggagaggagaggggttttattgacggattttcggtttttttgtattaaagatttgggttaaggttttggggggtatcgcgtttttatcgtgtagttttttttcgtttttcgaggcgcggtatttatttttagcgttcgagtcgtttaggcggttagtaggagtagtgttaaatcgggtagtatcgcgattttgcgcggggtatcgagtgcgttgttgtgcgagtgggattcgtcgcgtttttgttttgttcgcgtcgttatcgtcgtcgtttttcggggttttcgcgtacgttttttcgcgtgttttcgtttatcgttgtcgaggaaattgacggagttcgagcgcggcggcggggtttagagttaggcgagttagttgattcggtttatttcgttcggtattcgagagagatttttagcggcgtcgtcggggaattgcgttcgttcgcgtcgggaggggttttcgcgtttcgcgtttataggtgtacgcgtttttggcgtcgtttgtattttacgcgtttttttcgtttttcggtcgacggtttatttgggtttcgtgaatagtgggagggagagtttggggttaggagagggacggtgtaggattagggaaaggtgagttttaggacgttgaggttttagaaaagtcgagagcgtttttgttcgttttcgtgagtttgaattattcgatttcgtaggtttttcgggggtgtcgtataaaggattgttgttagggtgcgtttttattcgtatttcgttttttttttcggtttggagaggtggggtaggcgtttttggaagagaatgagaacgagtgaagtttaaaggaaataggattttttttgtttgttgagatagtaaaattttattttttaatttttaacgttaaaagtaggtacgagtaatttggaatttttatttttagaacgaattaaaggagtaaggcgtaggatttggtaaagaagcggttaatttatttatttttttttgaaagtagggttttgggtttgggttttgttttttt

SEQ ID NO: 129 - DNA, 2476 bp, Artificial Sequence
  chemically treated genomic DNA (Homo sapiens)
aaagaaataaaatttaagtttagaattttgtttttaagaagaagtaaatgggttggtcgtttttttgttaggttttgcgttttgtttttttggttcgttttaaagatagaaattttaggttgttcgtgtttgtttttgacgttgggggttaaaaaatgaggttttgttgttttaataagtaaagaaaattttattttttttaagttttattcgtttttatttttttttagaaacgtttgttttatttttttaaatcgagagaaaaaacgaaatgcggataaaaacgtattttagtagtagttttttatacgatattttcgggaggtttgcggggtcggatgatttaagtttacggggacgagtaggagcgttttcgatttttttagagttttagcgttttaggatttatttttttttgattttgtatcgttttttttttggttttagatttttttttttattgtttacgaagtttaggtgggtcgtcggtcggggagcggagggggcgcgtggggtgtaggcggcgttaagggcgcgtgtatttgtgggcgcggggcgcgagggtttttttcggcgcgagcgggcgtagtttttcggcggcgtcgttaggggtttttttcgggtgtcgagcggggtgggtcggattagttgattcgtttggttttgagtttcgtcgtcgcgttcgggtttcgttagttttttcggtagcggtaggcgagagtacgcggaggagcgtgcgcgggggtttcgggagacggcggcggtggcggcgcgggtagagtaaggacgcggcggattttattcgtatagtagcgtattcggtgtttcgcgtagggtcgcgatgttgttcggtttggtattgtttttgttggtcgtttggacggttcgggcgttggaggtgggtgtcgcgtttcggaaggcggggggaggttgtacggtggggacgcgatattttttaagattttaatttaagtttttaatgtagagaagtcgggggttcgttaatgggatttttttttttttcgttttcgtttgcggacgtttagcgtattttcgttttcggtttagttttgttttagggagtcgcgtttcggttcgttgagagggagcgggcgaggcgttggtttttttggtttcgcgttagttcggggcgagaagggtagggggcgattttgagtttagatttcgatttagtttttgttttggaagcgggggtcgggggaggcgagagatatttagataggggggaagggggaaggagtacgtggggaaaatcgaaaacgtagcgtttttaaagttagtttttcgtttttgaatcgttgttttttttttttttttgggttttggggaggaggaggaggagtcgggatagtttaggaagttaggagtttttcgtttttttttgcgtttttcgtttcgttttattttttttttttatttttattttttttttttgttttaattttttttcgcggttgttggcggcggtagtttgggtgcgattttagttcgagtcggcgtcggggtcgcgtatcgttttttataggtaaattttgtgtatgttcgcgttttttttttgtgtaatttgcgagaaatgggaggggtcggagatttatagttatttcgcgttttttttaagtttggacgtttcgggagttcgttcgtattttaagttttgtttgagaggtagaaggttcgcgggaataaaagtcgcgatatttcgttttcgtcgtgggtcgagtcgcgttagttttagtgcgttatcgaggttttcgttcggtttttttttcggggttgcgcgttcgtttgggagggggtagagacgttgtcggggtttttggcggagtttcggggtttttttgttttttattttcggattattttcgaggtttaattttgtgttgggttgtaaagtttttggcggggaggaaataaggcggagagtgggatgtgcgtttggaaagggtagtggcggatggtggggaggtacgggttttgttttgtgtatttaaggaggcgtttgtttgattaaggcgcggttttttttttggtagttttggggattttggtttagtttttttgggggtataggatgttggggagggttcgaagggttttttttttagggtgtagataaaaggatcgaattgagtgaagattaagacggagaagatggcgtttttgtagtgtagtaaagaaaagttgtgtggaggttgtagtttagtgaaatttatttattattaggtgtataataagttttttttatttatttaattttcgaatatttagttaacgtttgtgtataatgattgtttttttttatatttgaagatgtttagaagttgtttgtatgatagttgggttagaggaggttgtattttatttcggatttcggttgggtttttgtttggtattttaatatttgtaattttttttattcgttttttttttttttttttttagttttttagtaatt

SEQ ID NO: 130 - DNA, 2265 bp, Artificial Sequence
  chemically treated genomic DNA (Homo sapiens)
tatttttatttagcgtgtttagggtattcgtatcgtgttagtttgtggcggtttttaaattaattttgattgagtttttgaggtagttttttatttttattcgtattaatttagtacgtttattaaaatttttaagtaattttttttttgttacgtaaacgttaggagttgtttgatttttttttttttttatttttattttttttttagtttagtcggttttttggtcgggtaagttgggaatttagcgattgaagggttttggaaggtgtcggaggggagagacgttagttcgaatttttatagggtttttttattaaaaatttttaaaatgttggttcgagaaattttttttgttggagggtttgagttttatttttttttgtcgcgtgcgtttttattgtcgtgaatcgttgtgatttttaatttattattttatttcgcgtttttagcgttttagtcgttttgtatttgtttagttttttttttgtttatgtatttggttggttggtggcgtttgggacgcggttgtaggcgtcgtcgtattggtggtaggagttagcgtagttatagtcggtataagttttggttgggtagttttcggcggagtcgtttacgtcgtgatattgatattggtaggggttgagagttttgttataggaagtcgaggtaggagagtagtagtcgtgcggggtttttttcgtagggttgtagtagttagaatcggtagttgaagattcgggtaaagttggcgatttttgagacggatggtgtatagttgcggacgtttggaacggagtttggaagtcgtcggatcggatgttggggatttttttgttaaatatttttgttatcgtttacgggcggcggtagcggttgtttttgttgttgtggcggcggtagttgttttagttggttgtggggttgttttggtttaagtagatatggttgtgggagcgagggaggaggaggaagaggaggaggagagaaggaggaggcggcggtcgcggcgaggaggagattgggagtcgtgaagtttttgttttcggtcggttgattgttggttgaggcgtagtatagttttggttaaatttttaattgcgcgtttacgtatagcggggtggatttggttttattggttagggtttcgggagtaatagtaatattttaattcgtttaattagttttagtataataaagtattgtttaaaaagggggtggggggtattgagggggtgtgtgtgtttgtgtgtgtgcgcgttcgcgcgtttgtgtgtgtttttgtttgttgtggagtggggaggggttttagtttatttgtttttagtaaattttaaagatatcgtagaagttatagtataaggttttgtgatgtttggggataatgtgttttaattagaagttttaaaagtgtatatgttttgggaatgaggtgggcgattatttttttttgttttttattatttcgttttcgtgggttgtattaaaggcgagtgtagaattaaatattgatattgaaatagggagttaaggtgtagggagtggggagcggggggatgtaggatggaggtaagaaggaagggaaatagtattttttttttttttagtggagtgttgggaagtaagttgtaatttatatgttttgaaaatttgttttttggggaaagaggtaattttttttgtaggagatgagtatttttcggacgcgggttggataggaatgtttaagaaggtataatgtttattaagtcggtgaatggtagggagagtttttgtagtttaaagtttttataatgatttttaaaaattattgttttaaatatatataatttaaggaagtttaaattttcgttgttggtttgtaaaaagagttaaatagttttatttttgtttaatatttttatttatttttaagatattggaataaaggttttttaattatgtttagtggttaaagattttcgtaaaggtgaatggatttatgtataatttgttatatttttaggaaagaatgggaaagtttcggaagtggggaaggagataaggattaaagtttttgtaaagttagatgatgtttattgattttttttttttggttttatgaatgtggtttagtttttttattttttagattcgggtttttgtatttttttttttttattttttgttgtaaagatattttatttagttcgtatgtaagggaagaaaggatttaagaattatttagttgatatacgagatttaaattttgttttttaggaggtg

SEQ ID NO: 131 - DNA, 2265 bp, Artificial Sequence
  chemically treated genomic DNA (Homo sapiens)
tattttttgaagagtaaagtttagatttcgtgtattaattgaatgatttttgaattttttttttttttgtatacgagttaagtaggatgtttttgtagtaggaaataaaggggagagggtatagaaattcgggtttgggaaatggagagattgggttatatttatggagttaggagggggaaattaatgagtattatttgattttgtaaaggttttgatttttgtttttttttttattttcgagatttttttatttttttttggaggtatggtaggttatatatggatttatttatttttgcgggagtttttggttattgaatatagttaaagagtttttattttaatgttttgaaaatagatgaaaatattaaatagaagtggagttgtttggttttttttgtaagttagtaacgaggatttgggtttttttaagttatatgtgtttaagatagtaatttttaaaagttattataaggattttgggttgtaggaattttttttgttatttatcggtttaatggatattgtgtttttttgggtatttttgtttagttcgcgttcgggagatatttattttttgtaaaggaagttgtttttttttttaaagagtaaatttttaaaatatgtaagttataatttgttttttaatattttattaaaaaaaaaaaaaatgttgtttttttttttttttgtttttattttatattttttcgttttttattttttgtattttgattttttattttagtattagtgtttaattttatattcgtttttggtgtagtttacgggggcggggtagtgggaagtaaggaaagatggtcgtttattttatttttaaaatatgtgtatttttgaggtttttgattggaatatattgtttttagatattatagagttttgtgttgtggtttttgcgatgtttttggaatttattaaaaatagatagattaagatttttttttattttataataagtaaaaatatatataagcgcgcgggcgcgtatatatataaatatatatatttttttagtattttttattttttttttaagtaatgttttgttgtgttaaaattagttggacgagttagggtgttattgttgttttcgaggttttggttaatagaattagatttatttcgttgtgcgtaagcgcgtaattaaggatttaattaaggttgtgttgcgttttagttagtagttagtcggtcggagatagagattttacgatttttagtttttttttcgtcgcggtcgtcgtttttttttttttttttttttttttttttttttttttttcgtttttatagttatgtttgtttagattagagtagttttatagttaattagggtagttgtcgtcgttataatagtaaggatagtcgttgtcgtcgttcgtgagcgatgataggagtgtttgatagaagggtttttagtattcgattcggcgatttttaagtttcgttttagacgttcgtagttatgtattattcgttttaggaatcgttaattttgttcgagtttttagttatcgattttgattattatagttttacggggggagtttcgtacggttattgtttttttatttcggttttttatggtaaagtttttaatttttattagtattagtattacggcgtgaacggtttcgtcgggagttatttagttaaagtttatgtcgattatagttacgttagtttttattattagtacggcggcgtttataatcgcgttttaagcgttattaattagttaggtatatggatagggggaaggttgggtagatatagggcgattaggacgttgggggcgcgagatggggtggtagattgggggttatagcggtttacggtagtgggggcgtacgcggtagaagggagtaggatttagattttttaataaagagagtttttcgggttagtattttagggatttttagtaggagagttttgtggaggttcgaattagcgtttttttttttcggtattttttaaggttttttagtcgttgaatttttagtttgttcggttaggaagtcggttaggttggaaaggggataggggtggagagaagaaagaattaagtagtttttggcgtttgcgtaataaagagaaggttatttgggaattttggtaagcgtgttgggttggtgcgagtgggaatagaaggttgttttaaaaatttagttaggattagtttgagagtcgttataagttagtacggtgcgggtgttttgagtacgttgggtgggggtg

SEQ ID NO: 132 - DNA, 2368 bp, Artificial Sequence
  chemically treated genomic DNA (Homo sapiens)
aatgcgtatattttatttgtattttgatttaaataaattgttaaaaaaaattataatataattgggtatttgaatatagattagatataaaatgatattaaggaattgtgaattattaaatgtgataatagtattgtggttatatgttaaaaagaagaaaatttttattttgtagatatatattttgaaatatttatgtttaaagtgatattatgtttagaatttgttttagaaataattttaaggttgggaagcgggtaagataaagacgaaataagattggttatgagttgttaattgtggaatttgagtgaggattagtatatggggtttgtattatattattttatttttttaaatgttcgaaattttttattaaagttaagataaagttaaattataaagattgttttttaaataaaaaaggggtcgggcgtttacgtttgtaattttagtattttgggaggtcgaggcgggcggattacgaggttaggaaatttagattattttggttaatacggtgaaatttcgtttttattaaaaatataaaaaattagtcgggcgtggtggcgggcgtttgtagttttagttattcgggaggttgaggtaggagaatggcgtgagttcgggaggcggagtttgtagtgagtcgagatcgcgttattgtattttagtttgggcgatagagcgagattttgttttattttttaaaaaaaggaatagaatagaaaggtattaagaagaattagaaaaaaaatttattgtttttgatttattttttgtttttttttaaacgttttggtgtggagaaaaggatgagtattggtaataagtattatagtttgttattggggtgggcgggattgatgttttttttatttaaatttttgatattttgtttattataaatttttttgtaataattgttttttaaaatgttgtattaaaatgttattttttttgattgttgaggaattttgtatttttttaaattttgcgttcgcgttttggttgggagatgtggggaaaattttgggagtttaggatagggagaggtaagtttttatagaagtgggaatggttaatagttttttgagaagatagttttttttttggggaggtagaggaagttttaagaatatataaagataggagagtggaagggtcggttagtttggagatattaaaagagatttcggatgaggataggggttgattcgaaagtttcgtttgatttcgggttgtaggagggggcgtgggacgggggcggagtcgttggcgatgataatagttttacgtgatcggttaatattgagtgttgtttcgttttggcgttagagtcgtcgtggttcgttttattttcggcggtggtatttgttttcggtggttttgaggacgtgtgggttaggggcggtttcgaaattaggaagcggagggggagtaggtaaggaattcggcggggggtttttggggttggtgtgagggagtggtttcggtttgcggatgtttatttcgggggagtcgtgcggagaagtaatcggttcgcgatgtagttttcgggtttcgcggcgggttcgcgagttttttttgagcggagaggtgttcggttcggagggagtcggcggttttggggttacgatttttcggaaatatttgtttacgttattagcgtaagttttttcgatatttttgtttcgtattttttggtgtagaaaatggtggttagtttgcggggcggggcggttgaggcggggggcgagggtggcgaggagggttagggttagggttagggttagggtttcggggcggggcgggggaggggtcggatggcggtagtttttagttagcgttttgttgtagtagtttttattttttttatttcggtagtttgtaggtttgcggggttaagtgtcgcggcggcgtatttcgcgttaagaattcggaggaggagattgtaaggataggtttaggtcggtgcgagggtcggtggtgaggcgggggtcggaacgtgaggaaagtttagtttgagattttaatttatgtttttattttcgtttttttttattttatgtaatttttttttttttatacgttattttcgttttttattttgttgtttgcggaagtttggagatggatttatagggaaaatggtgggttttgcggaagggaggggttcggattgagggtattttatagggtatattggttttttaggtggaaaaaaatgaaatgttagagtataaagttaagtttagggttttgaattttaaaaggtgtttagtagggtttttgtttttagtgtttattagtttattaagaatttagtttatttttttttttttgttttttaggagtaatggagttt

SEQ ID NO: 133 - DNA, 2368 bp, Artificial Sequence
  chemically treated genomic DNA (Homo sapiens)
ggattttattatttttaggagataagagagagaaaatgggttgaatttttggtggattgataagtattgaggatagaggttttattaggtattttttaaaatttagagttttggatttgattttatattttaatattttatttttttttatttgagaagttagtatgttttgtggggtgtttttaattcgagtttttttttttcgtaaagtttattattttttttgtagatttatttttaggttttcgtaggtagtaaaatggaggacgaggatggcgtgtgggaaggggagggttgtatggggtagaggggggcgagggtgaaggtatggattagggttttagattgggttttttttacgtttcggttttcgttttattatcgattttcgtatcgatttgggtttatttttgtagttttttttttcggatttttgacgcgaggtgcgtcgtcgcgatatttagtttcgtagatttgtagattgtcggggtgggggaagtgggggttgttgtagtagaacgttagttaggaattatcgttattcggtttttttttcgtttcgtttcgaggttttggttttggttttggttttggtttttttcgttattttcgtttttcgttttagtcgtttcgtttcgtaagttgattattattttttgtattaagaagtgcggggtaggggtgtcggaaaagtttgcgttgatggcgtaggtaggtgttttcgaagggtcgtagttttaggatcgtcggtttttttcgggtcgggtattttttcgtttaaggaaggttcgcgggttcgtcgcggggttcgggggttgtatcgcggatcgattgttttttcgtacggttttttcggggtgggtattcgtaggtcggagttatttttttatattaattttagggatttttcgtcgggttttttatttgtttttttttcgttttttaatttcggggtcgtttttggtttatacgtttttagggttatcgggagtaggtattatcgtcgagaatggaacgagttacgacggttttgacgttagagcgagataatatttagtgttggtcggttacgtggggttgttgttatcgttaacggtttcgttttcgttttacgtttttttttgtagttcggagttaggcggggttttcgggttagtttttatttttattcggagttttttttagtatttttagattggtcggtttttttatttttttgtttttgtgtatttttgggattttttttgtttttttaagagggaagttgtttttttagggagttgttggttatttttatttttgtggggatttgtttttttttgttttgggtttttaggattttttttatattttttaattaggacgcgggcgtagaatttaaaggggtgtaaaattttttagtagttaagaaaaataatattttaatgtaatattttaaaaaataattattgtaagaaaatttatgatgagtaagatgttaaaaatttaaataaagagagtattagtttcgtttattttaatggtaaattgtggtatttgttattaatgtttatttttttttttatattagaacgtttggggggggataggaaatgagttaaggatagtggattttttttttaattttttttaatatttttttgttttgtttttttttttggggggtggggtagagtttcgttttgtcgtttaggttggagtgtagtggcgcgatttcggtttattgtaagtttcgtttttcgggtttacgttatttttttgttttagtttttcgagtagttgggattataggcgttcgttattacgttcggttaattttttgtatttttagtagagacggggttttatcgtgttagttaggatggtttggattttttgatttcgtgattcgttcgtttcggttttttaaagtgttgggattataggcgtgagcgttcggttttttttttgtttaagaaatagtttttatagtttaattttattttaattttaatggaaaatttcgaatatttggaaaaatggaatagtataatgtaaattttatgtattagtttttatttagattttatagttaataatttatggttaattttatttcgtttttattttattcgttttttaattttaaaattatttttgaagtaaattttagatataatattattttaggtataaatattttaaagtatgtatttataagataagggtttttttttttttagtatataattataatattgttgttatatttaataatttataattttttaatattattttatgtttaatttgtgtttaaatatttaattgtattatagttttttttaatagtttgtttgaattaagatataaataagatatgcgtatt

SEQ ID NO: 134 - DNA, 3650 bp, Artificial Sequence
  chemically treated genomic DNA (Homo sapiens)
attgtatttttggttttatagttttttattgtcgattttaggtttttttggattttaggtttttttttttaagatgtattttagaggattaaaaatatattttatttgggtttcgtttgtttttgtggaagggtagtttattagaggatataatttcgtgttttaatttgtttttttttttaaaggaaatgtggagaaaaaaaaaaagtagaaattggaaataattaatatttagtttattttattcgatttttaggggaattggtgaggagtttaagatgattttttttttttagagaaagaatttaaagtttagggaaatagcgataggggagtttaagattgtttttgttagtttttttttggttatttttcgttgcgatcgtaggatagtttttattagtaggagaatcgggtaagtgtgtggataagtagagagtgtgttgaataatttgtaacgttttatgaaatacgtattgttatggttttttaaaaggttttgcggaagtcgtttgtttttattaattaagtttttatttatataaaagtagaagtagaagtagttttagaaaatatattaataattttttatttttttgaagattagagtagtagaaaataggtgatttgtattataaaattgtatttatttttttttttttttagattttatattatattagtttatttgtgttacggtgtataaaaaatggaataggcgtttttattatattgtttttttttaaaaatagattatttatattttaattttgttttttttaaattcgatttttaataggagagttttttattattttagatggagtgaggttgtacgattgggatggaagaaaggaattttttaaatttgggggaatttttgttttttgttttaagattattttatttggggtgtgggggtgggcgcggcggttagggtagtggaacgtagtcgcggttgcgttatttttgtatttttaggcgcgcgggagggatcggcggggacgcgagttgcggattttggcgaattcgggggaggtagatagggggaggcggatatttagtcggtaggcgttttagttttttcgtagtcggcgggttttttttttgatagttttaggaaaggtagattttttttttagttagttaggtaaggtaaagattgttgttgagtttgttgttattgagggcgtatagattttggggagatcgaagtttgttattgcgggattttgtggggtaatttgggtttacggaagttttttgaaagaggggagaagggtttgtattttttttatggaggatttttttttttttagtatttcgtttgatgtatttaattggtagaagtgagattttaataggtagtagagagcgtttacgtggaggaggtttggggcgtcgcggcgttatttttattttttttcgggatcgcgtttatttttaaagttatacgtcgacgaattaatttatgttttaaatttttttttttagtttcgtgagttcgcggcgatattgggtcgtggggtggttgggaacggttttttttttcggaaaaattagagaacggtttggagagttgaaacgagcgttcgcgagtaggttcgtgtagaatcgggttttaggatcgttgagtttcgtagggcgtttttgggggacgttaggtcgtcggtttttttgttttcgttgagatggataacgtttcgttttcggagttttggttcgttaacgtatcgggttcggattcggcgttgagttgttttaacgcgtcgattttggcgtcgttgtcggcgtcgttggcggtggttgtattagttgtttacgcggtgatttgcgtcgtgggtttggcgggtaatttcgtcgtgttgtacgtgttgttgcgggcgtttcgtatgaagatcgttattaatttgtttatttttaatttggttatcgtcgacgagttttttacgttggtgttgtttattaatatcgtcgattttttgttgcggtagtggtttttcggggagtttatgtgtaagtttatcgtggttatcgattagtataatattttttttagtttttatttttttatcgttatgagcgtcgatcgttatttggtggtgttggttattgcggagtcgcgtcgggtggtcggtcgtatttatagcgtcgcgcgcgcggtgagtttggtcgtgtgggggatcgttatattcgtcgtgttgtttttcgtagttttcgttcggttagacgacgagtagggtcggcgttagtgcgtgttagttttttcgtagttcgaggttttttggtggcgcgcgagtcgtttttatacgttcgtgttgggtttcgttattttcgtgtttattatttgtgttttttatattattttgttgtgtcggttgtatgttatgcggttggatagttacgttaaggttttggagcgcgttaagaagcgggtgatttttttggtggtggtaattttggcggtgtgttttttttgttggacgttttattatttgagtatcgtggtggcgtttattatcgatttttcgtagacgtcgttggttatcgttattttttattttattattagtttgagttacgttaatagttgttttaatttttttttttacgtttttttggacgttagttttcgtaggaattttcgttagttgataatttgtcgcgcggtagtttgatttttttagcgttcggtttcgtaattgttcgttatttttggttagcgagggaggagtcggcgttagagtgcgggattagataggtcgtttaggttttttggggaaatcgattcgcgttttatattcgatttagtagatcggaagcgttgcgattgtgttcgtaggttgattttgttaagttttttaggtgatgcgcggttatgtcgggtgaggagaattgaggttgagatcgttatattgagggttttttaaagtcgaggtggaggaagaggagggtagaggaggagggcggtattgttgggaatcgttttttttttgttttgttttttgttgttttattcgagttttggtagtttggaatttggttggagtcggaatttttcgcgttttcgaagggaggttcgaggacgttgtcggcgtttttaggcgtcggtttcgcgcggtttttgttgtagttggcgtatagtttcggcgggtttttttgtttttcgcgcgttttgggaagacggttaggcgcgcgcgtttggcgtttatttttgtgagattcgtttggtttggcgtcgcgggcggggatcgttgtcgaggtcgttagcgtttttttaattggggaaaatataataattcgggatgttttatcggagtgtgtatatatttgtgtgtgtgtgtgtgtggtgtgcgcgcgtttgcggaggtatgaaatgcggggaaagaggttggcgtttggtagtgattgtttagaatatgatacgaatagtgatttttttttttgtttgtttttattttttttttttgtttttttttttttttattcgtgattttttttgaaaatgttagattttcggagtaaggaattcggagtagttcgggcgcgcggtttcggcgttttttggaggagttagcggtcgagtgtttagcgtcggaggatcgcggggttttgtggtggagtatttcggttgagcgcgttttatagcg

SEQ ID NO: 135 - DNA, 3650 bp, Artificial Sequence
  chemically treated genomic DNA (Homo sapiens)
cgttgtgaagcgcgtttagtcggagtgttttattataaagtttcgcgatttttcgacgttaagtattcggtcgttggtttttttagggggcgtcggaatcgcgcgttcgggttatttcgggttttttgtttcgggagtttgatatttttaggggagattacggataggaaagggaaaaggtaaagaaaaggagtaggggtagatagaaagaaggattattattcgtattatattttaggtagttattgttaagcgttagttttttttttcgtattttatgttttcgtaaacgcgcgtatattatatatatatatatataggtgtatatatatttcgatggggtatttcgagttgttgtgttttttttagttgaagaggcgttggcggtttcggtagcggttttcgttcgcggcgttaggttaagcgggttttataggggtgggcgttaaacgcgcgcgtttgatcgtttttttagagcgcgcggaggataaggggattcgtcggggttgtgcgttagttatagtaggggtcgcgcggagtcgacgtttgggggcgtcggtagcgttttcgggttttttttcgaaggcgcggagagtttcgattttagttaggttttagattgttagggttcgggtggggtagtagggagtagggtagggagggggcggtttttagtaatatcgttttttttttttatttttttttttttttatttcggttttagggagtttttagtgtggcgattttagttttagttttttttattcggtatggtcgcgtattatttggagggtttggtaaggttaatttgcgggtatagtcgtagcgttttcgatttgttaggtcgggtatggggcgcgagtcggtttttttaggaggtttaggcggtttgtttggtttcgtattttggcgtcggtttttttttcgttggttaggagtggcgggtagttgcggagtcggacgttgggggagttaggttgtcgcgcggtaagttattagttggcggaggtttttgcggaagttggcgtttaggaaggcgtagaggaaggggttgaggtagttgttggcgtagtttaggttggtgatgaagtaggagatagcgatgattagcggcgtttgcgggaggtcggtggtgagcgttattacggtgtttaggtggtagggcgtttagtagaggaggtatatcgttaggattgttattattaggaaggttattcgttttttggcgcgttttagggttttggcgtggttgtttagtcgtatggtatgtagtcggtatagtagggtggtatagaggatatagatggtggatacggggatggcgaagtttagtacgagcgtgtagaggcggttcgcgcgttattagaaggtttcgggttgcggaaagattagtacgtattggcgtcggttttgttcgtcgtttagtcgggcgaagattgcgaagggtagtacgacgagtgtgacgattttttatacggttaggtttatcgcgcgcgcggcgttgtaggtgcggtcggttattcggcgcgatttcgtagtggttaatattattaggtagcggtcggcgtttatgacggtgaggaagtagaggttggagaaggtgttgtattggtcgatagttacgatgagtttgtatatgagtttttcgaagggttattgtcgtagtaggaagtcggcgatgttgatgggtagtattagcgtgaagagttcgtcggcgatggttaggttgaggatgaataggttggtgacggtttttatgcggggcgttcgtagtaatacgtatagtacggcggagttgttcgttagatttacggcgtagattatcgcgtagataattggtatagttatcgttagcggcgtcggtagcggcgttagagtcgacgcgttggagtagtttagcgtcgggttcgggttcgatgcgttggcgggttagggtttcgagaacgaggcgttgtttattttaacgagggtagaggagtcggcgatttggcgttttttaaggacgttttacggagtttagcggttttgaagttcggttttgtacggatttgttcgcggacgttcgttttagttttttaagtcgttttttggttttttcggaggaggggatcgtttttagttattttacggtttaatgtcgtcgcggatttacggggttggaaagaggaatttaaagtataggttagttcgtcgacgtgtaattttagaaataggcgcggtttcgaggaggggtgggggtggcgtcgcggcgttttaaattttttttacgtgagcgttttttgttatttgttgaaattttatttttattagttgaatatattaaacgaaatgttagagagagaagaattttttataggaaaaatgtaaatttttttttttttttttaggaaattttcgtagatttaggttattttatagaatttcgtagtggtaagtttcggtttttttagggtttgtgcgtttttagtaatagtaagtttaatagtagtttttattttatttggttggttggggaaggggtttgttttttttggagttgttaggagaaaagttcgtcggttgcggggaggttgagacgtttgtcggttgggtgttcgtttttttttgtttgtttttttcgagttcgttagagttcgtagttcgcgttttcgtcggtttttttcgcgcgtttggaagtgtagggatggcgtagtcgcgattgcgttttattgttttgatcgtcgcgtttatttttatattttaagtaaaatggttttagaatagagaatagaaatttttttaaatttaagggattttttttttttattttagtcgtgtaattttattttatttgaaataatagaaagtttttttgttaagaatcgaatttaaggaaaataaagttagggtgtaagtgatttatttttaaaggagaataatgtagtggaggcgtttgttttattttttatatatcgtaatataaataggttaatgtaatgtgaaatttgaaaggaggaaaaagtgagtgtaattttataatgtaaattatttgttttttgttattttggtttttaaggggatagaagattgttagtatgttttttaaaattatttttatttttatttttgtgtaagtaaagatttgattagtaaagataaacggttttcgtaaagttttttagggaattatgataatgcgtattttataaaacgttataagttgtttaatatattttttatttatttatatatttgttcgatttttttgttaatgagagttattttgcgatcgtagcggagagtagttaaggaaggattagtaggggtagttttgaatttttttgtcgttatttttttggattttggattttttttttaggaagggaaaattattttaggttttttattagtttttttaagaatcgaatgaaataaattaaatattggttatttttaatttttgttttttttttttttttatattttttttaggagagagagtaaattaaaatacgagattatattttttagtaaattatttttttataaaagtaggcgaagtttaaataaagtgtatttttggttttttaggatgtattttagagaagggggtttgagatttagagagatttaaagtcggtagtagaagattgtggggttagaaatatagt

SEQ ID NO: 136 - DNA, 2429 bp, Artificial Sequence
  chemically treated genomic DNA (Homo sapiens)
gtcgttaaggttgtggcgttacgtttttaagcggatacggtagaagttttggggttagatataagatttttaagtttgaatgggtagcgtaaaatttagataagtttttcggtagtgtcgttaatttttgttaggtatagaagatatagcgagaatcgtgagtcgttacgaaagtttaaaatattgagttcgcgttttgttaagtagtaggcgtataaatttatattttcgagcgttttttggaggtttcgtttatttttttttttcgagtcggttagagatttggaagagggcgggttaagggtgaggagggtagtatgcgtatgcgcgtttaggatttagttagtgagttaataaggaatttcgcgagtgttgaaagtcggtggcgtaggtcgtcgttttggatgttggcgagatagatgttattttttagaggaagaggaggaggcggcgaagcgtttttttagttttagtttttttttcgttttttttttttttttttttaatttttcgtttttttttaaattagtcggttttttttgattttagtgattcgtttggtttcgtttattttcgtcgacgtgattttcgtcgtgaggtaagcgtcggtggaatttagagtttcgcggaagagtagaacgtttgggagtgtgtagtttttgggttcggtttaggttcgtcgcggaggcgcggcgtaggggagcgttcgggtgggagtttcgtttttttattagtttattgcgacgtagtatttaggtttaggttttttcgtttattttcgtcggattcgggtttttggtagtagcgggtgacgtagacggaatattatgtcgttcgcggtcgagttttcgttattttcgtttttcgagagcgcgttttttaagttcgtagtttcgatcgttagcggcgggagtaatagtagtaataaaggcggtttcgaaggcgtcgcggcgtaggcggttgcgtttgcggttagcgttggtttcgtagacgtcgagatggaggtgagggcgatttgcggtatggggagcgggtgtagcggggaggaggagttggttttttcgtcggatcgtggcgatcggacgtagagtcgggtttttttttttgtattagatttagttttatattttgtggatacgaaatgatgtttttatttttgtttttttgtttttattttattcgagttaagtaaaatggatttttggttttttatatttaaattatttgtttttttcgtgaattttgataaatatttgaacgtttttagtgaatagatgtttttggttatcgtggttcgggggatttatcgttttttttttattagatttttataatttttttttttatttttgaatgtggtttttagtttttattaaatttcggggaagggcgaggagatgattttttaggagcgggatgtacgggcggggtgaaggaggtatttaaaagtagcgcgttcgaggatttgggtttttttttttttttttcggtttttgtaggggcggtatttgttgtgggtagaaataatggcgagagttggatggtcgagtgcgtagtggggataagcggggcgtagttgtttttgtgaagggagagaaggttttttttaggtattattttattggaagggaagtaattaaggtagtagtagttgtttcggatttttcgtttaatttaggggggatgaataagtgtaggaatgaattagagaattaggcgtagttggttggtttttagttcggtatttttttttttttggtttttggttttaagaaaaaaaaaaattagtattattcgttgtcgagatttatgggtttgggttgggtaggggatgttgatagtattgagggggttggaaagatgggggaagttgttaggcgggtaaattggatatgtttttaggttttgtatttgggaataaagtaattgttttttttaatttttatttttttggttttcgatttgttttgagatattttgtgagtcggagtttaaagatttttgggatttttttatttttagatagaatgaaagtaatattgtttcgaagatgagttttgatgtagaattattatatagtaagaaaatggtagcgtaatttattattgaggtttttggtatagtagttatatttgggtagttggggttaagtaatattaatgttagtaattatttaaagaatttttagtggtgagggtaggtttagtgatataggaatttttgatagtttttgtagttttgagtgattaagataagattatttttaaattaaaatatatttagtgttgtttttttttttttaaggaaatggtttttttgggttattagggttttttaatttggatttttgttttaaggtttaaggggtttgatataaagtaattatgtgtaaatgtgtagttttttataaaaattgtttatagtttttt

SEQ ID NO: 137 - DNA, 2429 bp, Artificial Sequence
  chemically treated genomic DNA (Homo sapiens)
gaaaaattataaataatttttgtagagaattgtatatttatatataattgttttgtgttaaattttttaagttttggaatagaaatttaagttaaagagttttagtaatttaaaagaattatttttttaaggaaaaaaaagtaatattgaatatattttaatttggaagtaattttattttaattatttaaaattataggaattattaggagtttttatgttattaaatttatttttattattaaaagttttttaaatgattattaatattaatgttatttaattttagttatttaaatataattattgtgttaaaagttttaatggtaaattacgttattatttttttattgtataatgattttgtattaagatttattttcggagtagtattatttttattttgtttaaggataggaaaattttagaaatttttgggtttcgatttataaaatattttaaaataggtcgaaggttaagaaaataaaaattggaaggagtaattattttgtttttagatgtaaagtttggaagtatatttaatttattcgtttggtagttttttttatttttttagtttttttagtattgttagtattttttgtttaatttaaatttataagtttcggtagcgagtggtattaattttttttttttttaaggttagaggttaaaaagagaaaagtgtcggattgagagttaattaattgcgtttggttttttaatttatttttatatttatttattttttttaaattagacgggggattcgagatagttgttgttgttttggttgttttttttttagtggaatagtgtttgggaggggttttttttttttttatagaagtagttgcgtttcgtttatttttattgcgtattcggttatttagttttcgttattgtttttgtttataatagatatcgtttttgtaaggatcgggaagaagaaaaggaggtttaagttttcggacgcgttgtttttaaatgttttttttatttcgttcgtgtatttcgtttttaaggggttattttttcgttttttttcgaagtttggtggaaattaaaaattatatttagaggtaggagagggaattatgggagtttagtgggaaaaaaacgatgggtttttcgggttacggtaattaagaatatttgtttattgagagcgtttaaatatttgttaggatttacgaaagagataaataatttaaatgtgaggagttagaaatttattttgtttagttcgaatagggtaagaataagggagtaagagtgagagtattatttcgtatttatagggtgtgaagttgagtttggtgtagagagagaaattcggttttgcgttcgatcgttacgattcggcgagggagttagtttttttttttcgttgtattcgttttttatgtcgtaagtcgtttttatttttatttcggcgtttgcgggattagcgttggtcgtagacgtaatcgtttgcgtcgcgacgttttcggggtcgtttttgttgttgttgttgttttcgtcgttggcgatcgaggttgcgggtttggaaggcgcgttttcgggaggcgggggtggcggaggttcggtcgcggacgatatgatgtttcgtttgcgttattcgttgttgttagaggttcgagttcggcggggatggacggggaggtttaggtttggatgttacgtcgtaataaattggtggaggagcgagatttttattcgagcgtttttttgcgtcgcgttttcgcgacgggtttgagtcgggtttaggagttgtatatttttaaacgttttgttttttcgcggggttttaggttttatcggcgtttattttacggcgggaattacgtcgacgagggtgggcggggttagacgggttattgaggttaaggaaggtcggttgatttagagaagggcggagggttgggggaagggaaaaggaaaacgaaagagagattgaggttgggaaaacgtttcgtcgtttttttttttttttttggaagataatatttatttcgttagtatttaggacgacgatttacgttatcgatttttaatattcgcgagattttttattggtttattgattgggttttgagcgcgtatgcgtatattgttttttttatttttggttcgtttttttttagatttttagtcggttcgggagagaagagtgggcgggatttttagggagcgttcggaggtgtaggtttgtgcgtttgttgtttggtaggacgcgagtttagtgttttaggttttcgtaacggtttacggttttcgttgtgttttttgtgtttgataggggttggcggtattatcggaaaatttgtttgggttttgcgttgtttatttaaatttggaagttttgtgtttggttttaaaatttttgtcgtattcgtttagaggcgtgacgttatagttttgacgat

SEQ ID NO: 138 - DNA, 2284 bp, Artificial Sequence
  chemically treated genomic DNA (Homo sapiens)
tgtggtattgttttttgtatcgtagggtttttcgggatcgatagattttggataatagtagttgggaaatattttaaatatataatatatttttaatttttaaatattggagttgtggggtttttttttttttttttttttttttttgggggttggaggcggaattttttggaaaattttggtattttgtttttttattaattttattttttgtggttgtttttattaagatatattttttttttgataatttttttatattgtatttagtataatagatgtatttgtggatttattgggtttttattgggttttgggaatattgatgttattttatttaaaaattaatttaagtttaatgttttgatgaaaatgaaaatatatttatagggaagtaaatatttatagttatttagttttttaaatgttatatatattttattttatttaaagtgttttttttttttttttaattataaaataatttagtttatttttaggaagatttttttatttattgtttttagttatgttagtatattttcggttttaaggatagagaatagttaggagttatagtattttgttttttatttttcgtatgtttttttttaatttttattttttttttttttcgtgttgtttttttttttttttatgtaaagtagaataagaagattgttttttataaagataataggttttttttaattgtaaatgattatattataagtcgtatttgttagttaattagtgtatttaagtttttgttagcggatgttgaaatgatgtttgtaataattgattgggtttttgcgagtttagggatgtagatttttttttttttcgtttttcgtgcgagttttagtcgttaatgaaaatcgtatgaaatagattttttttttgttatgtaatcggtttttttttcgtttttcggttgatttgggtataatgttttttatgagagtggagatgtttgcggcgacggcggagttggggaaggggacgcggggattcgagagtacggaacgtttcgtttaggtggacgttagtttttcgtttgcgagtagtttagcgtatcgtttatttggttgcggacggggtggttttatttaattatgatttttttttttgaaacggagtaagattgaataatttattatacgacggatggcgagggaaggaaatgtaaaaaagaaaaggaaaagaaaaaaattggaattagatggttaaattttatattagtatcgagaggttgttaggagattttattttgttcgcggttgtttcggttttaggttcggtttttcggcgttcgcgggtttttattttttcgttcgtttagtttttttagttaggtgcggtcgttttcggattggttttttttggtcgagcgcggagagtagggttgggcgttggggttaagggaggggcggaggggcgcgcgtttgggtagggacgggggagggagattgggtggaatgaagtggggaaagataagagtggtagaagaaaaaaaaaattttcggttaggagaaaagtggtggattacgtagagagacgttatgaaattcgtagatttaatgaatgttatttaattttagtcgattggttgagtttcgttggtagcgtacgaagcgacgcggtttcgagataaaagcgagtgtagcgtcgcgtgttggggaaaaagtcgtatagcgtcggcgcggttcgggaggaaggggcgggggcgagtaggatagagttatagatttagagacgtttatttcgtcgtttatgttagttagcgtgttagcgcgtcgaggatcgggtttggtgggggcgggttgggtataaattaacgtgtatttttcgttattggaaacgtgggtgttttatgttgggggaattttttgggtttcggttttcgattttttagttttaattttttttttagtgttattaagtaagttattttcggagaaacgtttggaaagtaggaaagagtcgaagttcggggagtagttttgtttgttggttgtaggggttcggtttttagggttttgtgagataaggaaaaagaggttttgggtattgttttttatcgggttgaaattcgtgagaggtagtttcggcgcgggagtcggagtttgtatcgtttagagggggcgtagcgagcggtcgggacggaggggaggggttttatttttgagttttgtttgtatttggtggcgttttagtttgttgttttatttagttttttttgttttgtttattgtaattgggatttggtttcggttgttgt

SEQ ID NO: 139 - DNA, 2284 bp, Artificial Sequence
  chemically treated genomic DNA (Homo sapiens)
gtagtagtcgggattaggttttagttgtagtggataggatagaagggattgaatggggtagtaggttggggcgttattaggtgtaagtaaagtttagggatagggtttttttttttcgtttcggtcgttcgttgcgttttttttgggcggtgtaggtttcggttttcgcgtcggggttgttttttacggattttagttcggtgggaggtagtgtttagagtttttttttttttattttataaaattttaaaagtcgaatttttataattagtagataaaattgtttttcgagtttcggtttttttttgttttttaggcgttttttcgggaataatttatttagtggtattgggagaaaggttgggattggggggtcggggatcgaaatttaaaagatttttttagtatggagtatttacgtttttagtggcgggggatgtacgttggtttgtgtttagttcgtttttattaagttcggttttcgacgcgttgatacgttagttggtatgggcggcggggtgggcgtttttgggtttgtggttttgttttgttcgttttcgtttttttttttcggatcgcgtcggcgttgtgcggttttttttttagtacgcggcgttgtattcgtttttatttcggagtcgcgtcgtttcgtgcgttgttagcggggtttagttagtcggttggaattgagtagtatttattgaatttgcggattttatgacgtttttttgcgtggtttattattttttttttaatcggggatttttttttttttttgttatttttatttttttttattttattttatttagtttttttttttcgtttttgtttaaacgcgcgttttttcgttttttttttggttttagcgtttagttttgtttttcgcgttcggttagagggagttagttcggagacggtcgtatttggttggagaggttgggcgggcggaggggtggagattcgcggacgtcgggaagtcggatttggagtcggagtagtcgcgagtagaatggagttttttaatagtttttcggtgttgatgtgaaatttgattatttgattttagtttttttttttttttttttttttttgtatttttttttttcgttattcgtcgtgtagtgaattgtttagttttgtttcgttttaagagaggagattatgattgagtgaagttatttcgttcgtagttaggtaagcggtgcgttgagttgttcgtaggcgaggagttggcgtttatttgggcgaggcgtttcgtgttttcgggttttcgcgtttttttttttagtttcgtcgtcgtcgtaggtatttttatttttatgagaaatattgtgtttaagttagtcgaaaggcgagggagaagtcggttatataatagaaggggaatttgttttatacggtttttattagcgattgaaattcgtacggggggcgggggaaggaggggtttgtatttttgggttcgtagaaatttagttagttattgtagatattattttaatattcgttggtaaagatttaaatgtattgattaattgataggtgcggtttgtgatgtagttatttatagttgggaaaagtttattgtttttgtggaaggtagtttttttgttttgttttgtatggagaggagaggagataatacgaaagggaggaaaagtgagggttggggagaaatatgcggagaatgggaaatagaatattgtaatttttaattgttttttatttttaaaatcgaagatgtgttagtatgattaaaaatagtgaataggaagatttttttaggagtaaattgaattattttgtaattggaagggaagaaaaaatattttagataaaatgagatgtgtgtggtatttagaggattgggtggttgtggatatttgtttttttgtggatatatttttatttttattaaaatattaagtttggattagtttttaagtgaaataatattagtatttttaaaatttaataaaagtttagtggatttataggtatatttgttgtattaggtgtaatatggagagattgttagggggaaaatatattttaatagaaatagttatagagggtgaggttagtggagaaataaaatattagaattttttaaagaatttcgtttttaatttttaaaaaaaggaagagaaaaaaaaaaaaattttataattttagtgtttgggagttggagatgtattatatgtttagagtgttttttaattgttgttatttaaagtttgtcggtttcggggagttttacggtatagggagtaatgttata

SEQ ID NO: 140 - DNA, 2290 bp, Artificial Sequence
  chemically treated genomic DNA (Homo sapiens)
aatgtagtaatattcgggtttatttagtaatatagttattatttatatatatttaaaggttattaagataaggtagatgtaggatagtttttttattcgtttattaaaatggaaattttaggttagtttttataagaaatgggaaatttaagcgattttggcgaaacgatttttgagaaaattttttaagggtaataaaataatattttaaataaatagattttatttgagggaatggggatattatatagtaattgatattcgaatggttttaaatggattgattcgtcgtaagttttgaggttgagttaaatttttatgaagaattattaggaatagggttattagaaaattaagttttaaaagcgtttttgtttttgtcgaaggtattatattttggtatttttaagaatcgttttttgagggagggaataaaggagagtggataattcgtagtaaattttttttttatgtttttagaaaatgtagagacgataggatttgaaaatttttgttataaagatggtttttaaaaatgtatataattttaaatgattatttgggtagttataattgtatgtttatagttcgtatttagaggtatggttttacgttttggttttgaaggataataaggaggtttttaaggaaatgtcgtgagaaagattgttggttaagtattgttacggttattggaggagtatttgttagtgaatcgacgttggtttttttagttttattagtgtacgtatattagttcgtgtatttcggtcgtcgttggtaggttttattagttaagttggaggagtagttgtcgtaattacggtaagcgaattgaaattttagagtcggtttcgttcggtagagcgttcgcgtttttcgcgtagcgtacgtttcgcgcgtaaattcgagatgtgatcgcgagttgcgatttcgcgcggttgcgacgggttttatttaacgcgtacgaggggattattattgtttttgttttgggcgttcgcggttttatattattttcgtatataacgcggtcggtgttaagtttttaaacgtttcgagagttttaaggatcgcgcgcgcgaaggcgtcgtagtaagtgggtatatattagatattatttcggcgtgtttcgcgggagaagttagtgtatatattttttcgtaaggcggggttgttagtgtaatataggaattttgttttttttttagaaaagtttttttttttattttttttttaatatatttatttgcgttttaatagttttttttttgcgttatacgcggtcgtattcgggtacgtttacgttcgtgtacgttgttaggcgcgattgttttcgttcggttttcgtcgtttttaatttgtttgtgtttacgggaggggcggtgttatttttcgaggcgtttaattttttttattttcgtcgtaacgggttgagttttaggaatttcgcgggtataattttcgtcgtttttattagtgttttcgtttagagttcggattagggcgtattatttttattttgttagacgtagcgggggcgcgtatagattttagtttcggcgtttaaaatggattaggggtaaggcgcggacgtcgttttcgtttttacgtttttagtatttgtttgttgtgattcgaagttgtagttattacggttcgtgtcgttggtcgttagtattgtcgcggaggagtcgttcggggcgagtttcgcggagaggcggtggcggcggcggcggcgggaaaggggattggaagtcggcggaattttcgttttattcgcgtcgcgtcgcgtcgcgtcggtaatcgttttttttattcggtcggttattgttttagtgacgtttaggcgtcgcggtttcgtcgtttgtagcggggcgggaaggaggggtttgtttggaagagcgttaggaggcggggtcggcggcgagttcgcggcgtcgcggtcgtcgtcggcgcgtgttttgttcgatcgtttttcgggttcgtgtcggtagggagatgtcgggttttagtagtttagtttcgttttttcggattttcgagttttattaggttttttcgataaggtttttttggattcggtggagagcgttgagcgtttagaggaggttgattttaggtgtaagtttgtaaatttcgaggttcggggcgttaacggggagttagagtagttaacgtgggggttattttatgtgtttataaatgtatttataaatatatataagtatatatatatatgtgtgttttttttaaaaattttttttttttttttatttcgtagttaagg

SEQ ID NO: 141 - DNA, 2290 bp, Artificial Sequence
  chemically treated genomic DNA (Homo sapiens)
ttttggttgcgaagtagggggaaaaagagaatttttaaaagagatatatatatgtgtgtatatttatatatatttataaatatatttatgaatatataaagtaatttttacgttagttgttttgatttttcgttagcgtttcgggtttcgggatttgtaaatttgtatttggaattagttttttttgggcgtttaacgttttttatcgagtttagagaaattttgtcggggaagtttggtgagattcggaagttcggagggacggagttgagttgttgaagttcggtatttttttgtcggtacggattcgaagggcggtcgggtagggtacgcgtcggcggcggtcgcggcgtcgcgaattcgtcgtcggtttcgttttttggcgtttttttaagtaagtttttttttttcgtttcgttataaacggcgggatcgcggcgtttgggcgttattgaggtagtagtcggtcgggtgaggagggcggttgtcggcgcggcgcggcgcggcgcgggtggggcgggggtttcgtcggtttttagttttttttttcgtcgtcgtcgtcgttatcgttttttcgcggagttcgtttcgagcgattttttcgcggtagtgttgacggttagcggtacgagtcgtagtagttgtagtttcgagttatagtaggtaagtgttgggggcgtgggggcggggacggcgttcgcgttttgtttttggtttattttggacgtcgaggttaaggtttgtgcgcgttttcgttgcgtttagtagggtaggggtggtgcgttttagttcgaattttgggcgggaatattggtgggggcggcggaggttgtgttcgcgaagtttttagagtttagttcgttgcggcgggagtagagagaattgggcgtttcgggaggtggtatcgtttttttcgtgggtataagtaggttgggggcggcgggagtcgagcggggatagtcgcgtttggtagcgtgtacgggcgtggacgtgttcgggtgcggtcgcgtgtagcgtaagaaggaaattgttgagacgtaggtgagtgtattggagggaaagtgggggagggggtttttttagaaaaagggtaggatttttgtgttgtattggtaatttcgttttgcgggaggatgtgtgtattggtttttttcgcggaatacgtcggggtggtgtttggtgtgtgtttatttgttacggcgttttcgcgcgcgcggtttttggagttttcggggcgtttggagatttaatatcggtcgcgttgtgtgcggaggtggtgtagggtcgcgggcgtttagggtaggagtaatgatgattttttcgtgcgcgttaggtgaggttcgtcgtagtcgcgcgaggtcgtagttcgcggttatatttcgggtttgcgcgcgaggcgtgcgttgcgcgggaagcgcgggcgttttgtcgggcgaggtcggttttgggattttagttcgtttgtcgtggttgcggtagttgtttttttagtttggttggtagggtttgttagcggcggtcggggtgtacggattagtgtgcgtgtattggtgagattgggggagttagcgtcggtttattggtaggtgtttttttagtggtcgtgataatgtttagttagtagttttttttacggtatttttttaaaagtttttttgttattttttagggttagagcgtaaaattatgtttttagatgcgagttatgagtatgtagttgtagttgtttagatggttatttagaattgtgtgtatttttaaagattatttttatgataaagatttttaagttttatcgtttttatattttttgaaaatatgggaaaaggatttgttacgagttgtttatttttttttatttttttttttaaagaacggtttttagaagtgttaaaatgtaatattttcggtaaggataaaagcgtttttaaaatttaattttttagtggttttatttttaataattttttataaaaatttagtttagttttaaaatttacggcgaattagtttatttaaaattattcgaatattaattgttgtgtaatgtttttatttttttaagtaaaatttgtttgtttgaaatattgttttgttgtttttgaagagtttttttaagaatcgtttcgttagagtcgtttgaattttttattttttgtggaagttgatttggagtttttattttggtgagcgggtggaaaagttgttttgtatttattttgttttagtaatttttgggtatatataaatggtgattgtattgttgagtggattcgaatgttattgtatt

SEQ ID NO: 142 - DNA, 5909 bp, Artificial Sequence
  chemically treated genomic DNA (Homo sapiens)
ggtcgtcggagtagggttttagcgtatcgcgagtttttgtttttttcgttttgtagcgtcgcgagtttttttttttttcgcgtttggtttcgtttgcgtttttttcggcgtgggtattcgtagattcgttaggaggttgacgagaggtgtttttatagagttttgtttttttttagatttttaaacgaaaagaaagagaaaagttaatttttcgtttttattttgtacgtatttggagagcggttggtggcgagcgattcgtataatcgtttttttcgcggcgtttttggacgggcggagagaattcgggtgattgagtttgaggttgagtttttttgggagcgatttatgttagttatttttatttttaagggggattcgcggtcgggtttacgcgcgaaggatgggtgttagggaaattgatttatagacgattcgtttcgcgagagattgataatttagttttgcgggttttcggggcgtttagattagtttttagttagaggatttggggttgtatagttttcggattttggagggggtggttcgggggtgggagattgcgagtattagtttacgtcggtttttttttattttgcggcggcgaggtgggaagggttaggatgcgagtttagtattttttttagaaatgtagtatttcgtttttttattttttttgttttcggcgtttttttttttacgcgttttttttcgttttttttttaagggcgttttttttttgtttttagtttacgtttgaatttttcggcgttttttttttttttttttagttttttttttacgttttttgttttcgggtattttttttttttaattttttattttcgtatcgtttgatttcgaggggcgggagcgtattgggttgcgtacgggtgggggcgtcgcgttagtttcgcgtagttgttttgacgtcgttgtcgtcgtcgtcgtcgtcgtcgtttttcgtagtttagttcgcgtttcgcggtagtttcgtagtgtattagttattatcgtcgtcgtcgtcgtttcgttagatttgttgttagtttgttcggtttagttttgagagagtttcgaacgttagttgcgagggttatgagttagagagtttcggggcgtcgcgcggagagtaagcggagatagcgattttgcgttttttagttttcgtttttttgtatcgcgtttttcgtattttcgggtttttttgtttttttcgttgtttttatcgtcgttatggttattttgtttcgtagtaagttgtttaacgtggttacgttcgtgtttaataagttttaggttaagatgagcggtatgttcgttaggatgggtttttaggcggttacggatgaggaggcggtgggtttcgcgtattgcgacgatttcgattttgagtatcgttagggtttgtagatggatattttgaaagtcgagggagagttttgcggggacgagggcgttgaagcgttcgtcgagggagatatttattattagcgaggtagcggagtttttttgtcgtttttcggttttaaggattaggtgggaggtggtggcgaattcgggggttacgataagtttaaaattacggcgtgggaggtaggttggaacgtgattaacgttatttaggtaagcgcgggatttttagttttgtttgttttttttttttttagtttagcgtgtcgggttttgttttcgatagtcgttcggtgatttcggtttggagatttttttttgtatttaggaatttttttttttttattttttttagttttgcgcggggatttacgtttttaggcggtgtttttcgttttaatttacgtttttttttaacggtattagttgtaagatcgttaggttgaagttcggtttgagatatttgttcggagatattgtaaaagtgaaggaaatggggggagggagtaggaagcgatgagaaagaaagaaaattaggattggagggtacggtttggttttggattttggaacggatttatagttgtatttttgggaggaaagaagaaggggaaatcgttgaggtcggagtttttttttttcgtatatacgtatagatacgtatacgtatataggtaggtatattatatgtttatagtttttttttttacgaataaaggcgtaggtataggcgtatacgatatgtatttatatatagattatagtattatttttaaatgtatttgcgtatatttttatagttttataaataaaagtatatatttgtatatattaaatatacgaatattcgtttgaatatatgtatatatatatgtatagatgtatgtagataggaattagtttgtttttttgggtgcggttttgttggagatatataggtatatatatacgaaagtatatatatgtttttatataaatatatttagttcgtaataatttagtattatttgtgtatagattcgtttttttcgttcgaaatttcggttgtatcgtaaagaggcggttagttttttttcgtgtgattttggcgaagttttttttagaggttaagaatggtttttgttttttaggttttttttttttatttttaattttttattttttattaggcggcgtaggatttttatatagggagtaggtttggagttttggtaacgattttcgagttagtaggggttggtaggtcgtagttttttgggtcgaaggagattttagttttaggtaatttcggttttttatagtttggtttcgcggcgtttttggagcgtattattattggggttacggaaggtaggttttttgggagtagaggttttttaggggttgttttatgtatcggggtaagtaggattttatcgggtttcgaatattagatggttcgatttaaggcgtttttcgtttcggggttcggcgagacggttttgttggattacggattcggggttgttttcgttttcgttgtgtttcgcgatttttcggggcgttttttaaggtttcgtttgataggttttaagggaggttagggtaggaggttggaggttcgtaggttttcgggattttggatttcgttagtttttagttttcgtgtggattttaaattttatagttttgttcgtttgattttgaagtttttggttttagatttttgttcggttcggttttttggtttttttggcgttttttcgttaagtttttttttttgtttgtttttttagtttttatttagtttttttttttaggtttcgttttcgttttattttaattttagttttgttttaagatttttaatttttagttttgttttttttttttcgcgcgttgttttttaagcgtttttatattgtttttgtttttgttttttaggggttttgttttatttttagtttttttttttttttattttatttttttttcgttttataattgtagtttttaacgtttttttttttggtttgagtttgagacgttcgagtttttttttttagttttcgtgttttattttagttttattataaatttcgtgtttattttttttattggtttaggtttagtttattattttttttagagttttttttcgattacgtttttttttgtttttttttatttttttttttaattttttattttgtttttgtttttagaaattatttcgaagtatttttttttttttttgtggtttttttttatttttagtttttttttattttagttttttcgttattattagttattagcgtattttttttttttagattcgtttatatatttttttttttttatttttggttcgatattcgggtttattattagtttttttatatttatttcgtagtttgtttttaatttttttttttcggcggtttagatttaatttttagtgtttttagcgtttttttcgggttatagcgttaagttacgtttttcgggttttttattcgttgttaagttcgttgagcgttcgcgtttggttgttttttcgttttatagggtatgttcgtgttgggtttattttacgttattttgtacggcggttatttggggttgttttttattattttcgtcgtcgttgtgtgttgttatatcggtaagatttttatcgcgtgtttgtacgaggagaatgaagacggcgaggtggtgcgcgtgcgggattcgtacgtggttatagttaacgtttgttgcgtttcgcgttttttaacgttgggcggtcgagtggtgaacgtagcgtagattatcgagttggtgatgacgtgtattttgtacgtggtggtgagtggtaattttatgtataatagtttttcggggttgttcgtgtcgtagaagttttggtttattatcgttacggtcgtgttgttgttttgcgttttttttaagaattttaaggtcgtgtttaagtttagtttgttgtgtattttggtttatttcgttattaatattttggttatagtttattgtttatcgcgggcgcgcgattgggtttgggagaaggttaagttttatatcgacgttaagaagttttttatttttattggtattatcgtgtttagttatacgttttagatttttttgttttcgttggagggtaatatgtagtagtttagcgagttttattgtatgatgaattggacgtatatcgtagtttgcgtgtttaagggttttttcgcgttcgtcgtttattttatttgggtcgacgagattaaggaggttattacggataatttgttcggttttattcgcgtcgtggttaatatttttttggtggttaaggcgttgttgttttattttttgttattttttgtcgttgtcgaggtgttggagaagtcgtttttttaggaaggtagtcgcgtttttttttcggtttgttatagcggcgacgggcgtttgaagttttgggggttgacgttgcgttgcgcgttcgtcgtttttacgttgtttatggttatttatgtgtcgtatttcgcgttgtttatgggttttatcggtagttttacgggcgtcggtttttgttttttgttgtttagttttttttatttgcgtttgttttggcgtaagttgttgtggtattaagtttttttcgacgtcgttattttcgttatcggcggtatttgtagcgtgttcggtttcgtgtattttttcgagggttttatcgaagtttatcgaattaacgcggaggattagggcgtaagggcgagttttcgtcgcgtttttgcgtttttttttttttttttttatttcgtttttattagtttagtgcgttttgtcgtcgcgtttgggaggttaagttttaaatatttttggtttttagtttttgattattcggggatgggggggatgggaggggatagggatttacgatttatcgcgtttgcgtttttgttgtttttttttttttataatattttggttttggggggaggcggggtgtatttgcgggtagggttttttgtttttttaagtggggtttcgatattttggttttagttatcgagggggttgggaagggagggagagggggcgtagttcgtaggcgtggtaatttgattttgggggaatattttatatttatttagagttcggaatttatagcgtttagttatttttagtaagagcgttttttatttcggagacgttttaattttgtagcgggaaaggttgattgggaaatttattttgggtgggtaattttttttaacgaagtcggaaggcgagaagtcgcggcggggttagtttgtttgtcggtttttaggaatttaaatttttattttgtgtaatttattaggtgtggaattgttttattgtgcgtgtggtgtgttcgtggtgaataagatgaaatgtatattagaaaaaaatttatttttaatttagagtgcggtatataattatattcgtaaataaagaagagataaaggtttgcgcggttcggtgtcgggtttgtg

SEQ ID NO: 143 - DNA, 5909 bp, Artificial Sequence
  chemically treated genomic DNA (Homo sapiens)
tataaattcgatatcgggtcgcgtaagtttttgttttttttttatttgcggatataattatgtatcgtattttaaattagagatagatttttttttgatatatattttattttatttattacgagtatattatacgtatagtagaatagttttatatttgataaattgtataagatgagagtttagatttttgaaaatcggtaggtaagttggtttcgtcgcggtttttcgtttttcggtttcgttgaaggaaattgtttatttaaaatggattttttagttagtttttttcgttgtagggttgaaacgttttcggaatgggaagcgtttttgttggaaatggttggacgttgtagatttcgagttttggatggatgtgaaatatttttttaaggttaagttgttacgtttgcgagttgcgttttttttttttttttttttaattttttcgatgattggaattaaagtgtcggggttttatttggaaggatagagaattttgttcgtaaatgtatttcgtttttttttaaaattagggtgttgtggaaaagaaaggataatagaaacgtagacgcgatggatcgtgaatttttgtttttttttattttttttattttcgaataattagaaattaggaattagagatgtttaaagtttggttttttaagcgcggcggtagggcgtattgggttggtgggggcggggtgaggggagaagggagagagcgtagaagcgcggcgggggttcgtttttgcgttttagtttttcgcgttggttcggtaggtttcgatgaggttttcgagggagtgtacgaagtcggatacgttgtagatgtcgtcgatgacgaagatggcgacgtcgaagaagatttggtgttatagtagtttgcgttagagtaggcgtaggtgaaagaggttgggtagtaagaaatagaggtcggcgttcgtgaggttgtcggtgaggtttatgagtagcgcgaagtgcggtatataaatggttatgagtagcgtgaagacgacgagcgcgtagcgtagcgttagtttttaggattttaggcgttcgtcgtcgttgtagtaggtcgggaaaaaggcgcggttgtttttttggaagagcgatttttttagtatttcgatagcggtaaagaatggtagaggataggataatagcgttttggttattagaaagatgttgattacggcgcggatggagtcgggtaggttattcgtgatgatttttttggtttcgtcggtttaggtgaggtaggcgacgagcgcgaagaggtttttgagtacgtaggttgcgatgtgcgtttagtttattatgtagtggaattcgttgggttgttgtatattgttttttagcgaaggtaggaagatttgagacgtgtagttgaatacgatgatgttaatggagatggggaattttttgacgtcgatgtagaatttgatttttttttaggtttagtcgcgcgttcgcgatagatagtaggttatgattaggatattgatgacgaagtgggttagagtgtatagtagattgaatttggatacggttttgaggtttttaaggaaggcgtaaggtagtagtacggtcgtggcgataatggattaggatttttgcgatacgggtagtttcgggaagttgttgtatatgaggttgttatttattattacgtataggatgtacgttattattagttcgatgatttgcgttacgtttattattcggtcgtttagcgttgggaagcgcggggcgtagtaggcgttggttatggttacgtacgagtttcgtacgcgtattatttcgtcgtttttatttttttcgtataggtacgcgatgaggattttgtcggtgtagtagtatataacggcggcgaagatgatgagaaataattttaggtagtcgtcgtgtaggatggcgtagggtaggtttagtacgaatatgttttgtggggcggagaggtaattagacgcggacgtttagcgaatttggtaacggatgaggggttcggggggcgtggtttaacgttgtggttcgaagggggcgttaaggatattgagaattgggtttgagtcgtcggggaggagaggttaagagtaggttgcggggtggatgtaggggaattaatagtgagttcgggtgtcgagttagagatggagagggagggatgtatggacggatttgagaaggaaaggtgcgttaatggttggtgatagcgagagggttagggtgggagagggttgagaatagggagaagttataggagggaagggagatatttcgggatggtttttggggataggaatagaatgaggagttgggggaggagatgagaagggatagaagggagcgtagtcggaaaggggttttaagaaaggtagtgagttgggtttgggttagtggaaagagtgggtacgggatttgtggtggggttggaatggggtacgggagttaaagaggaaaattcgggcgttttaggtttagattagaggaggaaacgttaaaggttgtagttgtgaggcgaaaaggaaatagggtagagagggagaggggttgaaggtggggtaaagtttttgggaggtaagaatagagataatgtgaagacgtttggggagtagcgcgcggggaggaggaagtagggttggaaattgagagttttaggataaggttggagttagagtgaggcgagggcgagatttaaggaaggggattaagtggaggttggggaggtaagtaggaggaggagtttggcgggaaggcgttagggaggttagaaagtcgaatcgagtaagagtttagaattagaagttttagggttaggcggatagggttgtagggtttagaatttatacggggattaagagttaacgaaatttagggtttcggaggtttacgagtttttagttttttgttttggttttttttggggtttattaaacggagttttgaaagacgtttcgggaagtcgcggggtatagcgaaggcgggagtagtttcgggttcgtgatttagtaaggtcgtttcgtcgggtttcggagcggaaagcgttttgggtcgggttatttggtgttcggggttcggtggagttttgtttatttcgatatatggaataatttttgggaggtttttgtttttagaaaatttgtttttcgtggttttagtgatagtgcgttttagggacgtcgcggggttaagttgtaagggatcggggttgtttagagttgaagtttttttcggtttagaaagttgcggtttgttagtttttgttagttcggaggtcgttgttaagattttaaatttgttttttatgtaggagttttgcgtcgtttggtggggagtggggggttaggaataaggggagagggtttagagagtaggggttatttttagtttttggagagggtttcgttagggttatacggggaggagttggtcgtttttttgcggtgtagtcgggatttcgggcgagaggggcgagtttgtgtataggtaatgttggattattgcggattaaatgtgtttgtgtgggagtatgtgtgtgttttcgtgtgtgtatatttgtatgtttttaatagggtcgtatttaagggagtaggttggtttttgtttgtatgtatttgtgtatgtgtgtgtgtatatgtttaaacgaatattcgtgtgtttggtatgtgtaggtatatgtttttgtttgtggagttgtaggggtgtacgtaggtgtatttggggatagtattgtggtttatatatagatatatgtcgtgtgcgtttgtgtttgcgtttttgttcgtgggaaggggggttgtgggtatgtggtgtgtttgtttatatacgtgtgcgtgtttatgcgtgtgtgcggggggaggagatttcgattttagcgattttttttttttttttttttttaaaaatgtagttgtgaattcgttttagagtttaagattaaatcgtgttttttaattttgatttttttttttttttatcgttttttgttttttttttttattttttttatttttgtagtgttttcggataggtgttttagatcgaattttagtttagcggttttgtagttggtgtcgttgggagggagcgtgggttagggcggaaaatatcgtttgggggcgtaggttttcgcgtagggttgggagggatggagaaagggagatttttgggtataggagggggtttttaggtcgagattatcgggcgattgtcgggggtagagttcggtacgttgagttgggaggggggaggataggtagaattgggaatttcgcgtttatttggatggcgttggttacgttttagtttgttttttacgtcgtgattttgggtttgtcgtggttttcgaattcgttattattttttatttggtttttggagtcggagggcggtagaggagtttcgttgtttcgttgataatggatgtttttttcgacgggcgttttagcgttttcgttttcgtagggttttttttcggtttttaggatgtttatttgtaggttttggcggtgtttaaagtcgaggtcgtcgtaatgcgcgaagtttatcgtttttttattcgtggtcgtttgaaaatttattttggcgaatatgtcgtttattttggtttgggatttgttggatacggacgtggttacgttggatagtttgttgcggagtaaggtggttatggcggcggtggggatagcggaaaggatagaaggattcgaggatgcggggaacgcgatgtaagaaggcgagggttggggggcgtaaagtcgttattttcgtttgtttttcgcgcggcgtttcggggttttttggtttatgattttcgtagttggcgttcgaggtttttttagggttggatcgggtaagttggtagtaggtttggcggagcggcggcggcggcggtggtggttagtgtattgcggagttgtcgcggggcgcgagttgggttgcggagggcggcggcggcggcggcggcggtagcggcgttagagtagttacgcgaagttggcgcggcgtttttattcgtgcgtagtttaatgcgttttcgtttttcggaattaggcggtgcgggggtgggggattggagagaggaaatattcggaggtaggggacgtgaggaaggggttaggagaagagaaagggggcgtcgagggatttagacgtgagttgggggtagaagaagggcgtttttgggaaggaggcgggagggagcgcgtgaaagagggagcgtcgagggtaggggaggtgggggggcgaagtgttgtatttttaggggaggtgttaagttcgtattttggttttttttatttcgtcgtcgtagggtgggagggggtcggcgtgggttgatgttcgtagttttttattttcggattattttttttagggttcgggagttgtgtagttttagattttttggttaaggattggtttgggcgtttcgaaagttcgtaggattgagttgttagtttttcgcggagcgggtcgtttataagttagtttttttggtatttatttttcgcgcgtaaattcggtcgcgagttttttttgaaggtagaagtggttggtatggatcgtttttaaggaagtttagttttaggtttagttattcgggtttttttcgttcgtttagggacgtcgcgagggaagcgattgtgcggatcgttcgttattagtcgttttttaaatgcgtgtagaatggaggcgaaaggttggttttttttttttttttcgtttgggggtttggaagaaggtaggattttatgaggatatttttcgttagttttttagcgggtttgcgaatgtttacgtcgagaggggcgtagacggggttaggcgcggaggaaagaagggttcgcggcgttgtaaggcggaggaagtagaggttcgcggtgcgttggggttttgtttcgacggtt

SEQ ID NO: 144 - DNA, 3051 bp, Artificial Sequence
  chemically treated genomic DNA (Homo sapiens)
gtattcggtgtagttggtttagattttgttttcgttttggtcggtgttgttggtaaaggcgtaggtgttcgtggagttgtacgttattatgtggaagttcgattcggatagtttgtcgaaggtttgttttaggaagttgaatttgaggtaatagcgcgaggtgtagcgtttcgggggacggtcggggtttcggttttcgtttagggtgtttttaaatatttttttggttagcgacgttttttcgtaaacggtgatgcgcgttattcgtcggaatttggcgttcgtttgcgcgtttcgttcgatggtgtaggagtcgcggtagtcgatggtgatgtagttcgagcgtcggttgtcgtttagcgattgggacggcgtgagtagcgggttcgtcgcgttttcggacggattgcggttagttagttttagcgtgggcgacggcgtttcggtagaggcgtttttttgttgttcgggtttcgagtagttaagcggtagtagttcgttatttagcgagttttttttgtgtatttcgcgtcgcgagggcggcggtttcgggtcgggttgttggggcgtttcgaggcggcgtacgagttttggtagttcgaagtattcggtttcgcgttgtagtcggttgcgttcggggaagtagtcgggtagtacgagttgtaagtttcgtaggtaatttaggatgtagcggaagaggaagtcgtttcggtttagaaagaagcggtttttgttgtttcgggttagtttttgcggttgttgttgcgtgaatatgcgttagagtagcgagtcgggtatcgatattatcgtgtagcgtcgggttacgtatatttggttttttacgtttagttttacgatgtcggggaagagcggtggtttcgcggaggacgacgaggagttattgtcgttttcgtcgtcgttttcgttgggtaatttacgtgtgttgttcgttagagttatgatagagaggtggtcgggtcgggatagtggtaggaagtcgcgttgtatttaggagttgtaatcgtttttttcggagtttcggaattcggacgttcgtttagttttgcgtttcgtcgtcgtcgtcgtcgttatcgtcgttatcgttatcgtcgttattttttagagtcgcgcggagtcgagcggtgcgagcgcgtcgttgtgcgtttttttgagttttagtgcgtttcgttcgttttgttcgcgcgttttaggcgagtgtcgggtcgcggttcgcgcgttgtttaagtagagtcgtttgttttggtgtcgtggcgcgtaggaggcgtgggcggcggcggagtttcgtttatcgggcgaggggaggtggggagcggggattcgatttgtattttaaacgcggacgttacgcggggttgttggttttatttcggttcgcgagcgttgggggcgttcggatttttattcgttttttatttattagtttcgtttcgtggtttcgtttaattttttttttttttcgaagaggattcgttcgagatttggcggtttcggaagatagttttttggagggatagttatcgcgtttttttttttttcgttttagttcgtatttaaggattttggaaggaggacgtgaattttcggaagtttgtcgtttcgggagtggaaatgcgtggtcgttttcggttttttcgtttgcggaattgggcgtttttagtagtgtagttgcggtttgttatcgttggttgtcgtgttattgaaagtagagagacgcgaaaaatttggagagacgaaagagtcgttttagttcgagcgtagttagattttgtttaagttgttttgtagttagtttggaaaataaataaataaatttagaaataaaaagtaaattttagtgtttcgtagtaggatgttttacgatagtttattttttggttgtagagataaaatgagatgaagttttaaatttgtttttaattgtaatttttttttttcgtagggttttcgaggtattttatttcgaagtgaaggggtaagatttcggaacgttcggttttcgggttttatttagttttcgttgaatcgcgtttttagatttataatagttgtagatttaacgtaatttttaaagttatttttggcgtttgtatgtttatttttttaaaagtttaggcgttttttttttttcgtatgtttcggttatttttcggttttgtttaagttttcgttagttttagaaagggatatttatatatttgaaggtttttgtttggattttattttttaatttttgttgtttatacgtttgtttttttttttcggattgtagtttatagaatcgttttttttttttggaagttttttttggttttttaggtgggtggggtttttggatggttttttatatattgtttgcgttgtttttagtacgttttgaaatgttatatttatgagtgattatttgattattgatttgggtatgaaaataagtaagagtttttgaatgttgtaaaaagagaagagtgtagaggagggtgttaagaaatgattgggttattgaatgttttttgtgtatttgttattatttgtagggtattagggagtgaggaatgtaaaggcgaataatttttaaagcgtttttagtgtagtttaataagtaaagggttaggggtttgcgtagttattatattagtttgaagtatagattatatattaggataaattaggtaagatttttgtttttgataaaatttatttttttgtgtaattatttagtgagttttatagtttttttatagataaatgttatttttattttgaaatgtttatatttgtttaataattatcgcgtttatgttagtgtgttgaaatgagattaatttttaaattagttattttaattgtaagtatagattttgatattgaatgtattttaatattttttttttgttgttgttttgttttttgggataaataatagataatataaaatttttaagttttagtgtaggatttcgaggtggttgtgttattaggcgttatattagtgttagagatttgataaaattagttttttttttataaatttaa

SEQ ID NO: 145 - DNA, 3051 bp, Artificial Sequence
  chemically treated genomic DNA (Homo sapiens)
ttggatttgtagaaaagaggttggttttgttaggtttttgatattaatataacgtttagtagtataattatttcgaaattttgtattgggatttggaagttttgtgttatttattatttattttaaagaatagaataataataaaaaaagaatgttgaaatatatttagtattaaaatttgtatttgtaattaagataattggtttgggggttgattttattttagtatattgatatgagcgcggtaattgttgagtagatataaatattttaaaataaaaatgatatttatttgtgaggagattgtgaagtttattgggtagttatatagaaggataaattttattaagaataaagattttgtttgatttattttgatgtgtggtttatattttaaattgatgtgataattgcgtagatttttgattttttgtttattgggttatattgaaagcgttttggagattattcgtttttgtattttttattttttggtgttttgtaaataatagtaggtatataagaaatatttagtgatttaattattttttgatatttttttttgtatttttttttttttgtagtatttaggagtttttatttatttttatatttaaattagtgattagataattatttataaatatgatattttagaacgtgttgggagtagcgtagatagtgtgtagggagttatttagaggttttatttatttgggaagttagggaaagtttttagggggagggggcggttttgtgggttgtagttcgagggggaaaagtaaacgtgtaggtagtaggagttgagagatgggatttagataagggtttttagatatataaatatttttttttgagattgacgggaatttggatagggtcgaagagtgatcgaggtatgcgggagagaaggggcgtttggatttttggaaggataaatatgtaggcgttaaaggtggttttaaaaattacgttagatttgtaattgttgtgagtttaagggcgcgatttaacgaaggttgaatgggattcggagatcgaacgtttcggagttttatttttttatttcgaagtgaagtgtttcgaaggttttgcgggaagagggaattgtaattaagagtagatttgaagttttattttattttgtttttgtagttagaaaataaattatcgtaaagtattttattgcgggatattgaggtttgttttttgtttttaggtttatttatttattttttaggttggttgtaaggtaatttgaataaaatttggttgcgttcggattggggcggttttttcgtttttttaggtttttcgcgtttttttatttttagtgatacgataattaacgatggtaggtcgtagttgtattgttggaagcgtttagtttcgtaggcgggagggtcggaggcggttacgtatttttattttcggggcgataggttttcgaaagtttacgttttttttttagagtttttgggtgcgggttggggcgagaggggagggggcgcggtgattgtttttttaaggagttgtttttcgaagtcgttaagtttcgggcgggtttttttcggaagagggagaaagttgggcgggattacggggcggggttggtgggtggggagcgggtgggagttcgggcgtttttagcgttcgcgagtcggggtggagttagtagtttcgcgtggcgttcgcgtttaagatgtaaatcgagttttcgttttttattttttttcgttcggtaagcgaggtttcgtcgtcgtttacgttttttgcgcgttacggtattagagtaggcggttttatttaagtagcgcgcgggtcgcgattcggtattcgtttggagcgcgcgggtaaggcgggcggagcgtattggaatttaagggggcgtatagcggcgcgttcgtatcgttcggtttcgcgcggttttaggaggtggcggcggtggcggtggcggcggtggcggcggcggcggcggcggggcgtagggttgagcgagcgttcgggtttcggggtttcggggaaggcggttgtagtttttgagtgtagcgcggttttttgttattgtttcggttcggttatttttttgttatggttttggcggatagtatacgtggattatttaacgggggcggcggcgggggcggtagtggtttttcgtcgtttttcgcggagttatcgttttttttcgatatcgtggagttgaacgtggggggttaggtgtacgtgattcggcgttgtacggtggtgtcggtgttcgattcgttgttttggcgtatgtttacgtagtagtagtcgtaggagttggttcgggatagtaaaggtcgtttttttttggatcgggacggttttttttttcgttatattttggattatttgcgggatttgtagttcgtgttgttcgattattttttcgagcgtagtcggttgtagcgcgaggtcgagtatttcgagttgttagagttcgtgcgtcgtttcggggcgttttagtagttcggttcggggtcgtcgttttcgcggcgcggggtgtataaggagggttcgttgggtgacgagttgttgtcgtttggttattcggagttcgaatagtaggagggcgtttttgtcggggcgtcgtcgtttacgttggagttggttagtcgtagttcgttcgggggcgcggcgggttcgttgtttacgtcgttttagtcgttggacggtagtcggcgttcgggttatattattatcggttatcgcggtttttatattatcgggcgggacgcgtaggcggacgttaagtttcggcgagtggcgcgtattatcgtttgcggaaagacgtcgttggttaaggaggtgtttggggatattttgaacgaaagtcgggatttcgatcgtttttcggagcgttatatttcgcgttattattttaagtttaattttttggagtaggttttcgataagttgttcgagtcgggtttttatatggtggcgtgtagttttacgggtatttgcgtttttgttagtagtatcgattagagcgaggataagatttggattagttatatcgagtat

SEQ ID NO: 146 - DNA, 4722 bp, Artificial Sequence
  chemically treated genomic DNA (Homo sapiens)
acgtgaagtttagtatttttttaagtttttgtttatatataaaaagttacgttttagaggttttatttttaatttaagataagtaggatattttaaaaattatttatttattagttggtttgagaaaatttatcgggtatttggagtaaggaggggggggagattttgaaattaaaaaagtaagagaaaataaaggtttagttatgagaagagagatagaaatttatgataatagaggtatttttttagtttaattgtttgttttagttgtgggggttggaggtagggtcgcgaggcggtgattgttttgatatttagttgttagataaataaaagaggtcgtttggcgttagtttcggcgtttcgtttttttacgtttgcggtcgtagtcgtcgcgttcggttggttcggttggaaattatcggttcggtcggagtcgcgtattttatagtttatagggcggggggcgattatgtttttttttcgttttcggattttagatttagtttttagtaatttcggtttttcgtttcggttcgttttttaggcgtgtaatttatttttgttttcgtcggttcgttcggtattcgcgcgggggatacggggttgtttatttttagcgtattcgggagatgtattttaagcgtgttggggaacgtgggggatttgcgggcgttcggggtgaatttttatattatattttgtgtatagagacgtagagtaaaggaaggaatggagaaagttgagaggataaaaggaaaggagttttagggttttagtcgagaagtttaggttttagcgtagtaagaggcgataacgttattgaggcgtcggggttttattaatttatagatttatttgtgcggaaggaaggaaaaagtaggggatatttaattttttttgtttgtttgtttttttgtattttggggttggtagagttgaaaggagatagatatttagttcggttttttatttaattttttttgttttaaaattttaaaggtgcgcggttacgatagtatttgggttattggtgttcgacgtgatttttcgtatttattaaaggagtaaatacggagattttttagtttttatagtacgttttttttagttttttttggcgggtttggattaaatttaattcggttatatattttaacgttttttcgggtgcggggaggcgtgatttttttatttttttttgtatttttttgttgattcggaaatgaaggcgtttaatttttaatcgtagattgtaggagtagtgttcgtagattttttcggggtaatataggagaaaatttggaagggaatttttagggaatgttttttgagtttttttttgttttttttttatttttagtttttagtttttttttaggagggtatgtatatttttttaggagggtatgtatatttttttaggagggtatgtatattttttttggagggatggttgtataaacgtattgttttaggggttttttttttagtattggcgtttcggaaaatgttgggggtagggggataattttttatttagttcgtagagtcggttaaggtgatgggggttgtagtatattagttcggggttgattttttcgtaagatttatagtaatatagttttttgattttcgaggaatgtttgagattcggttatttgaatattttgtatagtaggagggggagcgagtaggacgagggcggttgcgtaggttgcgcgtcggcgggcgttttcgggtttagtttgtagtttaggcggtcgggtagtaggaggtacgcggtgcgcgtttcgtcgcgggattttacggtttggagtagtagttttagttgtcgtttttttagttttttgagtatcgagtgcgtgagcgtttttagattcgtttcggcgttttcggtcgcgtcggcgttcgcggttggcgggtggggatggtggtgatttttggtatttcgtatcgttttgtttaggtagtatttagttttgttcgggtcgtcgttatcggttttatgcgttcggttgttcgtcgtttttttttttcgtagttcgtttttttttttatttttttttgcgttttttttttcgttttcgtcgtcgggcgtacggtttttttagagacgtcggacgagcgtagatcgtttggttttgaatatgcggggcgaggaggcgaggagaaaagtcgtttgtttgttaaggagcgaatatgattttcgtatattatgaagaagtcgggcgtcgagttggggtagtaggcgtaggcgatagtagtagtagtaggggttcgggtaggagcggcggcggttcgaggggcgtttcgtggtatgcgttagtttttcggaggtcggggcgcgcgcgggggttcgggggcgttcgtcggggatcgggggtttgcgtttcggttgttttatttcgcgcggttcgcgttttgcgcggtttttcggtttcggcgcgtttcggaggaattcggtcgtcgtttttttggggacggtcgagtttgttttcgtcggcgtttttttaaaaagaggttttttcgtagtggttttcgaatgtcgggttcgttagtttcggttttttatatggaaggttcgcgggggtaaaaaacgaaaggcgttcggttgggttgttggaagaaggaaaaagttttttttttttttgttaagtaatttaatttgggggtggggagaagtaggtaattaaaaaaaaaaaagtaagcgatttattttttttttttatatttttagtaatcggattttttcgaatttcgcgtatacgaagatttaggggagggggtcgagtggattttatttcgtatgagacgtttggtaaaataagaaggttttcgtaaaatttaataattaaatatgtaaagttttaaatgaaaattattattttttcgaattttagaggtttgggggcgttcggttggaattggggtttaaaaaaagaaaatgtttataaagtataataagatgtttgatgggtggaaaaatgtatttacgagttatattttttcgtttttttgtaaagtttcgttggttttttttttttttttttttgttaaaaaaaaaaaaaaaaatcgtgtatttttttaatttatagaaagttttggttagatcgttttaattttgcgtatttgggtggtttaggggagtttttggtttttttttttgcgtttttgggggtttaggttttcggcggggattttttcgaggttggcgcgggcgtaggggtagaagatgttgcggcggcggttgagttcggcggggttgatagcgcgggggagggtggcgcggcggcggcggagggttttagacgggtcgcgcgttttcgtttttttcgggtataagttgtttgttagtgtaggggtcgtcgatgtttttttttttggtcgcggttggtcgtcgaggtttttcgtatgggttgttcgtttcgatttagttgcggcggtaggaggtttcggtgttttttcggcgttttttttttcgagatttttttcgtcgcgttcgggagtttttttgttttcggttcgtttttttttggcgtttcggtttttttgtcgtcgttaggggttcgtcgcgtcgtatttaggggtttaggggtcgggcgttcggcggttcggcgtcgacggattggttttgtttcgggtagttttttttcgcgcggcgagcggatcgagtacggcgttcggttggttcggttggcgcggttcggggataggatttttcgtgcgtcgagtagtaagcgagtgtgttcggggtttatcgtttttcgtaaggtttttcgttttcgttttttttttttttttttttttttttttttttttttcgtttttagtcgtcgtagtcgcgtcgtttttttttcgttttttcgtatttttttttcggttttttgttcggttggttttattgcgtagtggcgcgttcggtttcggtttcgttacgtggtcgtttagatattttgtcgttttaaaaaaaaaaaaaaagcgattgtgtttcgtaaataatagatcgggtttttaaaagttatttttttttttaatttttcgttatcgttattttttttcgggtttgtagagggggtatcgatggaggggagagagataggtggggggtagagaagtttttagaatggattgagtttcggtcggagttatggagaaattggaaaagtagggagtatcgagcgggtttcgtcgcgagttttggagttgagcgagcgggtcggtggttcgatttcgattcggttgggtttcgcggtggttatttcgcgcgcgttcgttttagcgttttatttattggttttgttttaaaggttttggcggtggattttttggtcgcgttcgagggtaaggggaggagagcgttgtttcggtttaaaagatatttatatcggattggatcgaggttttgggaagtgtgcgttgaggggaatagtcgtcgagggcggggaggcggcgtgaatatgattttagcggcggtcgcgcgttttttttcgtttttttagtttcgggtttcggtttttaggattgtttggagaagtgtgttttgtgtatagttttggaatgtatttggtcggttgacgagttgtgaggggtagtatttcggcgggagaaggggagcgggggtgggggttcgtttgcgcgtcgcgggtaggttttttttcgggttcggaagattttcgttattcgttattttgtttttcggcgcgggaaggttatttagcg

SEQ ID NO: 147 - DNA, 4722 bp, Artificial Sequence
  chemically treated genomic DNA (Homo sapiens)
cgttgggtaattttttcgcgtcgggaggtagggtggcgggtggcggaggtttttcgggttcgggaggaaatttgttcgcggcgcgtaggcgagtttttattttcgttttttttttttcgtcgggatgttgttttttatagttcgttagtcggttaaatgtattttagagttgtgtataagatatatttttttaggtagttttagaaatcggagttcggagttgagagggcgggagggagcgcgcggtcgtcgttgaggttatatttacgtcgttttttcgttttcggcggttgttttttttagcgtatattttttagggtttcggtttagttcggtataaatgttttttaaatcgagatagcgtttttttttttttgttttcgggcgcggttaagggatttatcgttagggtttttaaaataaaattaatgaatgaagcgttagggcgagcgcgcgcgagatggttatcgcgaaatttagtcgggtcgaaatcgggttatcgattcgttcgtttagttttaaaattcgcggcgaagttcgttcggtgttttttgtttttttaatttttttatggtttcggtcggggtttaatttattttgggagtttttttgttttttatttattttttttttttttatcggtattttttttatagattcgggagggggtggcggtggcggggggttggggggagaaatagtttttagaaattcgatttgttgtttgcgaaatataatcgttttttttttttttttaaagcgatagggtgtttagacggttacgtgacgaggtcggagtcgggcgcgttattgcgtagtggaattagtcgagtagagggtcggagggggggtgcgggggggcggggaggaggcggcgcggttgcggcggttgggggcgggggagggaagggggaggaagggggagggaagggggcgggggcgggaggttttgcgggaggcggtgagtttcgggtatattcgtttgttgttcggcgtacggaagattttgttttcgagtcgcgttagtcgagttagtcgggcgtcgtgttcggttcgttcgtcgcgcgggagagagttgttcgagatagagttagttcgtcggcgtcgagtcgtcgagcgttcggtttttgagtttttgagtgcggcgcggcgagtttttggcggcggtagaaggatcggagcgttaggagagggcggatcggggataaggaggttttcgggcgcgacgaggagagtttcggaggaggaggcgtcgagaggatatcggggttttttgtcgtcgtagttgggtcgaggcgagtagtttatgcggggagtttcggcggttagtcgcggttaggggaagggatatcggcggtttttgtattagtaagtagtttgtgttcggggggggcgagaacgcgcgattcgtttggggtttttcgtcgtcgtcgcgttattttttttcgcgttgttagtttcgtcgggtttagtcgtcgtcgtagtattttttgtttttgcgttcgcgttagtttcgaggaagttttcgtcgaggatttgggtttttaggagcgtagggggaaagattagagatttttttaaattatttagatgcgtaggattgaagcggtttagttaaagttttttgtggattaaaaaaatatacgatttttttttttttttttggtagaagaaaaggagaggaagattagcggggttttgtaaggaaacggggggatgtaattcgtggatatatttttttatttattaaatattttgttatattttgtaaatattttttttttttaaattttagttttagtcggacgtttttagatttttgaggttcgaggaggtggtggtttttatttggggttttgtatatttggttgttaggttttgcgagagtttttttattttgttagacgttttatgcggggtgaagtttattcggtttttttttttgagttttcgtgtgcgcggaattcgaggagattcggttattaaggatatagaggaaaaaaataaatcgtttgtttttttttttttaattgtttgtttttttttatttttaaattaagttgtttagtaagggggaaagaggtttttttttttttttaatagtttagtcgaacgtttttcgttttttgttttcgcggattttttatgtaggaagtcgaggttggcgagttcgatattcgggagttattgcgggggggtttttttttggggaggcgtcgacgggggtaggttcggtcgtttttagggaagcggcggtcgggttttttcggggcgcgtcggggtcggagagtcgcgtagggcgcgggtcgcgcggggtggggtagtcggagcgtaggttttcgattttcggcgggcgttttcgggttttcgcgcgcgtttcggttttcgggagattggcgtatgttacggagcgtttttcgggtcgtcgtcgtttttgttcgggtttttgttgttgttgttgtcgtttgcgtttgttgttttaattcggcgttcgatttttttatggtgtgcggaggttatgttcgttttttagtaggtaaacgattttttttttcgttttttcgtttcgtatgtttaggattaaacgatttgcgttcgttcggcgtttttggaggagtcgtgcgttcggcggcgaggacgaggaggagggcgtagggggaggtggaggaggaggcgagttgcggggagaaggggcgacggatagtcgagcgtatggggtcggtggcggcggttcgggtagggttggatgttgtttgggtaaggcggtgcgaggtgttaaaggttattattatttttattcgttagtcgcgggcgtcggcgcggtcgggggcgtcgaggcggatttgaaggcgtttacgtattcggtgtttaagaaattgaaggagcggtagttggagttgttgttttaggtcgtggagtttcgcggcgggacgcgtatcgcgtgttttttgttgttcggtcgtttggattgtaggttgggttcgggggcgttcgtcggcgcgtagtttgcgtagtcgttttcgttttattcgtttttttttttgttgtgtaaagtgtttaggtggtcggattttaggtatttttcggaagttaagaggttgtgttgttgtgaattttacgggaagattaatttcgagttggtgtgttgtaatttttattattttagtcgattttgcgaattaggtgagaagttgtttttttatttttaatatttttcggagcgttagtgttggaagaaaagtttttagggtagtgcgtttgtgtagttatttttttagggggagtgtgtatatttttttgggagagtgtgtatatttttttgggagagtgtgtatatttttttgggaagagattgggggttgaaagtagagaagggataaggggaaatttaaagggtattttttgggggtttttttttaggtttttttttgtgttgtttcgaaggggtttacgggtattgtttttgtagtttgcggttaaaaattagacgtttttattttcggattaataagggggtgtagagggaggtgggggggttacgttttttcgtattcggaaagacgttgaggtgtgtggtcgagttggatttggtttaggttcgttaaggaaggttgggagaggcgtgttataaaggttggaaggttttcgtatttatttttttagtaaatacggagaattacgtcgaatattagtggtttagatattgtcgtggtcgcgtatttttggagttttggggtaaagagagttggatggaaggtcgaattgggtatttgtttttttttaattttgttagttttagggtgtagaggaataaataggtaggagaagttgggtgttttttatttttttttttttttcgtatagataagtttgtagattagtggggtttcggcgttttagtgacgttgtcgttttttattgcgttggggtttgggtttttcggttgagattttgaaatttttttttttttatttttttagttttttttatttttttttttattttacgtttttgtatatagagtgtgatgtgagggtttatttcgggcgttcgtagattttttacgttttttagtacgtttgggatgtatttttcgagtgcgttaggaatgggtagtttcgtgtttttcgcgcgagtgtcgagcggatcggcgggggtagaggtgaattgtacgtttggggggcgggtcggggcggggagtcgaggttgttgggagttgggtttggagttcgaggacggggagggggtatggtcgtttttcgttttgtgaattgtgaagtgcgcggtttcggtcgagtcggtggtttttagtcgggttagtcgagcgcggcggttgcggtcgtagacgtggaggagcggagcgtcgaggttggcgttaggcggttttttttgtttatttgatagttaaatattaaggtaattatcgtttcgcggttttgtttttaatttttatagttaagataaatagttgggttaaaagaatgtttttgttattataagtttttatttttttttttatggttgggtttttatttttttttgtttttttaattttagagttttttttttttttttattttagatattcgatggatttttttaaattaattggtgagtagatgatttttaaaatattttgtttattttaagttagaaatagagtttttagaacgtggttttttgtgtgtaggtaaaggtttggggaggtgttgggttttacgt

SEQ ID NO: 148 - DNA, 2146 bp, Artificial Sequence
  chemically treated genomic DNA (Homo sapiens)
aggtttgtgtattcgggtagtttttggttgttgttgttaggttgttttagtcggtcgttgttgtcgcggcgattggcgataagttattagttatttacgatggtttaaggaggcgaagaagagtaagcgattaggatattaaaacggttatcggaggtaggtttttagtatattagtcggtcgagggtcgagtttcgcgggcggtagtaagttttgggagttggaggtaatcgaattaaaaggcgttttagaaatttcgtttcgggattttgtttagtagggtttcgggttggagggcgtcgaggtttggcggacgggatagtgggaagagagaaaggtgttaaggggatttaagatttgggatttagaataagagggggtggggaataattttattaagttaaatagatttattttttttgtttttatgttggaaaaatttaggttttatatggtttttcgggagggagggagggagacggtggttgtcggtttttttttagggtttcgttggagaagggagatgagtttttcgtaagaattttattttgttaagtatattttagggagagttaggagagtaataatagttggggaagtttcgagagaggggataggttattttttaggatttaaaaaaattaatgggagaaagaaaaataataagaaaggaagatagagaaaggttgagatttttttagtagtcgcggagaaaatttagttttggatttggttgttgaaagaaaagagagagaggagaaaagaggagagaagtaggaagatagaggggagagagagagggagagagagagagagagagagagggagagagagggagggagggagggagggagagagagagtcgttgcgtggaaggaagtttaaagtttgtgaattttttttgaatcgagattggagttatatgggttataaattattgagatatatttttcgttatttataaattgatagtttattttagtttagtttattttagttatcgacgaggggagaataggtagatataatatatatttatatcgagttttagagcgagcggtaggcgataaattttttttttttgaaggtaaaggaaaaaaagattattgtttaaagttgcgtcgtttttcgttttttcgttttcgtttcgtaaagttatttcggttggggagttcgaggggtagatcggttagaggagtcgcgcggcgttcgttttaatttattcggtttaggagtaggggtgcgtaggagggagggggtgggggagcgggaaaaaaaatagaagatcgaaaggtgtcgggcggtttagttcgttagaatttagtttcgggttttagtagggttaagtcgttatagtgtggttgttttataagattggtacgttttatttttcgtaataatggtttttgtttttgtatagggaaaaaaaattatatagatatatatatatatttatttatatataagtttatatttttttatttttttttttttagtaagtttagatgtttgataaggagggaaggtgatggtggtgatggggaaggggggaaattttaaaatattcgtttttttaaaaaaagagtaagaagaaaagaaggagggtttttttttttttttttaaagaataggtaaaaatttaaatttagattggagggatagggaggaagaggtgagtaaaggtaaggaagggcggtgaagtttatagttttttttatattttattagtgaattattatgttaatatgagaagtagtatttggaggttgagttaaaggtaggtttggttcgggggtgagggtgtcgggtgtttttttgtatttattcgtaattggaatattaggatttttttagaaagtagttttgggtttttaatttttatattttggttttttttttttgagtttttagtttcggttttttttttttattatattttttttattttttttaaatttttttttagtttttaggtttagtttttaattaagggagagggaaagattagaatttaaaaaaaaaataaaaaaaaaatatttttttttttttttttttttgagaatagataataagcggtgagtgatgattttaaaaattttgaatattttgtagggggaggagggttgagaaaagggtgataaaagga

SEQ ID NO: 149 - DNA, 2146 bp, Artificial Sequence
  chemically treated genomic DNA (Homo sapiens)
tttttttgttattttttttttaatttttttttttttgtaagatgtttagagtttttaaaattattatttatcgtttgttgtttgtttttaaaaagaaaaagggggaggggtgttttttttttgttttttttttaagttttggttttttttttttttttggttagagattgggtttggagattggagggagatttgggaggaatagagagggtgtagtggagggaagaagtcggggttggagatttagaaggagggagttagagtgtgagggttggagatttagaattattttttaaaaaagttttggtgttttaattgcgaatgagtgtagaggggtattcggtatttttattttcgggttaggtttgtttttgatttagtttttaaatattattttttatattagtataatagtttattagtggggtatggggggagttgtgaattttatcgtttttttttgtttttgtttatttttttttttttgtttttttaatttagatttaaatttttatttgttttttaaggaaaaaaaaaaaaatttttttttttttttttttattttttttttggggaggcgggtattttaaaatttttttttttttttattattattattattttttttttttattaggtatttaagtttgttaaagggggagaggtgggggggtgtgagtttgtgtgtgagtgagtgtgtgtgtgtgtttgtgtggttttttttttttgtgtaaaagtagaggttattgttacggagagtagggcgtattagttttatagggtaattatattgtggcggtttagttttgttggagttcggagttggattttggcgagttgagtcgttcggtatttttcggttttttattttttttttcgtttttttatttttttttttttgcgtatttttgtttttaagtcgagtgaattgaagcggacgtcgcgcggtttttttggtcggtttgtttttcgggttttttagtcggggtggttttgcggggcgggggcgggggggcggggggcgacgtagttttaaatagtggttttttttttttttgtttttaaggaggggagatttgtcgtttgtcgttcgttttggggttcgatgtgaatatatattatgtttgtttgtttttttttcgtcggtggttaaggtaagttggattgaaataggttattagtttgtgaatggcggagagtatgttttaatgatttatggtttatatgattttaatttcggtttaagaagagtttataagttttaagtttttttttacgtagcgatttttttttttttttttttttttttttttttttttttttttttttttttttttttttttttttttttttttttttttttgtttttttgttttttttttttttttttttttttttttttttttttagtagttagatttagggttgaatttttttcgcggttgttaagaaagttttaatttttttttgttttttttttttgttattttttttttttttattaatttttttaagttttggaagatggtttattttttttttcggggtttttttagttattgttatttttttggttttttttggggtgtgtttggtaaggtggggtttttgcggggggtttattttttttttttagcgagattttggggggaagtcggtagttatcgtttttttttttttttttcgaggagttatatggaatttgaatttttttaatatggaggtaagggaaatagatttgtttggtttggtagagttgttttttatttttttttgttttggattttagattttgggtttttttagtatttttttttttttttattgtttcgttcgttaggtttcggcgttttttaattcggagttttgttgagtaaagtttcgaagcggagtttttaaggcgttttttaattcggttatttttagtttttaaaatttgttgtcgttcgcggggttcggttttcggtcggttggtgtgttgggaatttgttttcgataatcgttttggtgttttgatcgtttgttttttttcgtttttttgggttatcgtaggtggttggtagtttgtcgttagtcgtcgcggtagtagcgatcggttgaggtagtttggtagtagtagttagggattattcgggtgtataaattt

SEQ ID NO: 150 - DNA, 17968 bp, Artificial Sequence
  chemically treated genomic DNA (Homo sapiens)
ggttttcggaggtcgggattcgcggagggtttagtagtaggaagaaattttaggaggaagaaattttagatagatcgtcggcgaggtagcgcgggatttagttttaggcgtgcgcggacggtgtgcggagtgagtttttttaaaagtggagtttttgtgatgacgagtataggttcgtttgcgtgttcgtgggttgtttttttatcggtggtttttagtcgcggagagtagaattcggtagttttaggggttgtttgcgggagggtgttttttgttgtacgtgtgtgttcgttatgggtgtgtgtgtgtgtgtgttgggggggtgcgtttgtgtgtgtgtttgtgtgtgtgtacgcgtagtgtttgtttgtgtgtcgatttttgttttttttttacgtttttttttttttttttttttttttttttttgttttttttttcgtttttttcgtggttttttttttttgtttttgttcgtttgtgtgtgcgtgcgtttcgggatatatgtgttttgtgcgtcggagggtgggttttttgtacgtcggttttttttttggttagttttttttcgcgtttttgtttgggtcgtgtggtcggttggtagtcgtcgtttcggcggttttagtttgggggtttgtgaaggtttgggtaacgtgggtatcggcgtcggattcgtaggggtttttattttttttttattcggagtagtttttttgttaggttggatttagacgagcgttttttaattaaggataacggttttttaggcgtttatcgtttattcgtaggagggtgttcgtagagttttaagaaggtggttgttacgtttgtcgttttttgtttttatcgagaaatgtagttatagttcgacgtagggacggagaaggaagtcggtaaggggatggggtaagtatgtttgttttttaaaggttggtttttttggtcgagttattcgtttgatattttttttcggatgtcggtggtggtggtatggttttttcgtattttgtttgggttttggtttttgttttgattttttttttgttgtgtttgtttcgtttttgagaagtttggcggttttttagtgtggtttagtgttttttataaagaagattttttcgtttattagggagaaatttcgtggcggttcgcgttatgattgtttttttttttatatttttttttggatgattgggtagttgtggtgattttggagttttgggtttttatatttgtgtgggatagggaagttttttcggtttttatggtttaagtgatggttgtacgttcggtttaggaagaggcggaggtaagtttatcgtttttgatattggttttttaggaaaggcggtgttgtattttatttgtattttttttttgatttttgagggttaatcgtttttttcgtttttggggaaagtgttttttagtatcgaattttttggttgttacggatgttagggagttaacgggattgggttttggttgggtgtaggggaggttgcgttaggggtatttagtcggcggcgggttgggggtggggtgtattttgtttaaatttttcggtttttttggcgggtttttttgaacgtggcgtggattcgcgtataggttttgtttcgtaggtttttaggtgcgtttggtttttttttcgttttgtggggtaggtttttagtggtttttcgggcgtacgtttggatattattgttcgtttcgtcgtcgttttttacggttttaaagatatacgttgtttgtatgtgtttttgggggacgatagtgttatatgtggatatattggttttagttcggattcgtttttgtttttttttgttcgtgtcgtcggaagtcgtttcgggttgtcggagttttcgggttttggagatgaaggtaggtttttgtttttgttaggaaggagggaggtagtgggtttatgggtcggtgtttttgtagtcgatagtacgttttgcggttttggggatttttttgtgtttcggcgagatttttttcgttttattgtattggaattttattttcgattattcgttgggatttattatcggattttaagaggagttcgcgtagtttagtcggtatttcgaagttttttttttagtgggaatcgaagtagaagagcgattaaggaggtttttattataggatttttatgggttcgattatgggtttttcgtaggtttttttggtagttttttttttattcgtcgtttcgggttgcgttttcgtcgtcgtcgtcgtaatttttagtatcgtcgttttaggtttcgtagtcgtcgcgtcgtcgttattttttaaagggttcgtagtttgattttgcggagtaagggggggtggagcgggggagtcggtttcgttagcgcgtatgcgcgaggttcgagtcgtcgtttgggttatagtgaaagttatcgttgttcggggatgggtttttgatatttggggaagtaggagttttgtgtgatcgtgcgtttgagtttgggttgagattagttttggttagggtagttattaggacggttttcggaggtcgggattcgcggagggtttagtagtaggaagaaattttaggaggaagaaattttagatagatcgtcggcgaggtagcgcgggattttagttttaggcgtgcgcggacggtgtgcgggtgagtttttttaaaagtggagtttttgtgatgacgagtataggttcgtttgcgtgttcgtgggttgtttttttatcggtggtttttagtcgcggagagtagaattcggtagttttaggggttgtttgcgggagggtgttttttgttgtacgtgtgtgttcgttatgggtgtgtgtgtgtgtgtgttggggggggtgcgtttgtgtgtgtgtttgtgtgtgtgcgcgcgtagtgtttgtttgtgtgtcgatttttgttttttttttacgtttttttttttttttttttttttttttttttttttttgttttttttttcgtttttttcgtggttttttttttttgtttttgttcgtttgtgtgtgcgtgcgtttcgggatatatgtgttttgtgcgtcggagggtgggttttttgtacgtcggttttttttttggttagttttttttcgcgtttttgtttgggtcgtgtggtcggttggtagtcgtcgtttcggcggttttagtttgggggtttgtgaaggtttgggtaacgtgggtatcggcgtcggattcgtaggggtttttattttttttttattcggagtagtttttttgttaggttggatttagacgagcgttttttaattaaggataacggttttttaggcgtttatcgtttattcgtaggagggtgttcgtagagttttaagaaggtggttgttacgtttgtcgttttttgtttttatcgagaaatgtagttatagttcgacgtagggacggagaaggaagtcggtaaggggatggggtaagtatgtttgttttttaaaggttggtttttttggtcgagttattcgtttgatattttttttcggatgtcggtggtggtggtatggttttttcgtattttgtttgggttttggtttttgttttgattttttttttgttgtgtttgtttcgtttttgagaagtttggcggttttttagtgtggtttagtgttttttataaagaagattttttcgtttattagggagaaatttcgtggcggttcgcgttatgattgtttttttttttatatttttttttggatgattgggtagttgtggtgattttggagttttgggtttttatatttgtgtgggatagggaagttttttcggtttttatggtttaagtgatggttgtacgttcggtttaggaagaggcggaggtaagtttatcgtttttgatattggttttttaggaaaggcggtgttgtattttatttgtattttttttttgatttttgagggttaatcgtttttttcgtttttggggaaagtgttttttagtatcgaattttttggttgttacggatgttaggagttaacgggattgggttttggttgggtgtaggggaggttgcgttaggggtatttagtcggcggcgggttgggggtggggtgtattttgtttaaatttttcggtttttttggcgggtttttttgaacgtggcgtggattcgcgtataggttttgtttcgtaggtttttaggtgcgtttggtttttttttcgttttgtggggtaggtttttagtggtttttcgggcgtacgtttggatattattgttcgtttcgtcgtcgttttttacggttttaaagatatacgttgtttgtatgtgtttttgggggacgatagtgttatatgtggatatattggttttagttcggattcgtttttgtttttttttgttcgtgtcgtcggaagtcgtttcgggttgtcggagttttcgggttttggagatgaaggtaggtttttgtttttgttaggaaggagggaggtagtgggtttatgggtcggtgtttttgtagtcgatagtacgttttgcggttttggggatttttttgtgtttcggcgagatttttttcgttttattgtattggaattttattttcgattattcgttgggatttattatcggattttaagaggagttcgcgtagtttagtcggtatttcgaagttttttttttagtgggaatcgaagtagaagagcgattaaggaggtttttattataggatttttatgggttcgattatgggtttttcgtaggtttttttggtagttttttttttattcgtcgtttcgggttgcgttttcgtcgtcgtcgtcgtaatttttagtatcgtcgttttaggtttcgtagtcgtcgcgtcgtcgttattttttaaagggttcgtagtttgattttgcggagtaagggggggtggagcgggggagtcggtttcgttagcgcgtatgcgcgaggttcgagtcgtcgtttgggttatagtgaaagttatcgttgttcggggatgggtttttgatatttggggaagtaggagttttgtgtgatcgtgcgtttgagtttgggttgagattagttttggttagggtagttattaggacggttttcggaggtcgggattcgcggagggtttagtagtaggaagaaattttaggaggaagaaattttagatagatcgtcggcgaggtagcgcgggattttagttttaggcgtgcgcggacggtgtgcgggtgagtttttttaaaagtggagtttttgtgatgacgagtataggttcgtttgcgtgttcgtgggttgtttttttatcggtggtttttagtcgcggagagtagaattcggtagttttaggggttgtttgcgggagggtgttttttgttgtacgtgtgtgttcgttatgggtgtgtgtgtgtgtgtgttggggggggtgcgtttgtgtgtgtgtttgtgtgtgtgcgcgcgtagtgtttgtttgtgtgtcgatttttgttttttttttacgtttttttttttttttttttttttttttttttttttttttttttcgttttttttttttttgttttttttttcgtttttttcgtggttttttttttttgtttttgttcgtttgtgtgtgcgtgcgtttcgggatatatgtgttttgtgcgtcggagggtgggttttttgtacgtcggttttttttttggttagttttttttcgcgtttttgtttgggtcgtgtggtcggttggtagtcgtcgtttcggcggttttagtttgggggtttgtgaaggtttgggtaacgtgggtatcggcgtcggattcgtaggggtttttattttttttttattcggagtagtttttttgttaggttggatttagacgagcgttttttaattaaggataacggttttttaggcgtttatcgtttattcgtaggagggtgttcgtagagttttaagaaggtggttgttacgtttgtcgttttttgtttttatcgagaaatgtagttatagttcgacgtagggacggagaaggaagtcggtaaggggatggggtaagtatgtttgttttttaaaggttggtttttttggtcgagttattcgtttgatattttttttcggatgtcggtggtggtggtatggttttttcgtattttgtttgggttttggtttttgttttgattttttttttgttgtgtttgtttcgtttttgagaagtttggcggttttttagtgtggtttagtgttttttataaagaagattttttcgtttattagggagaaatttcgtggcggttcgcgttatgattgtttttttttttatatttttttttggatgattgggtagttgtggtgattttggagttttgggtttttatatttgtgtgggatagggaagttttttcggtttttatggtttaagtgatggttgtacgttcggtttaggaagaggcggaggtaagtttatcgtttttgatattggttttttaggaaaggcggtgttgtattttatttgtattttttttttgatttttgagggttaatcgtttttttcgtttttggggaaagtgttttttagtatcgaatgttttggttgttacggatgttagggagttaacgggattgggttttggttgggtgtaggggaggttgcgttaggggtatttagtcggcggcgggttgggggtggggtgtattttgtttaaatttttcggtttttttggcgggtttttttgaacgtggcgtggattcgcgtataggtttttgtttcgtaggtttttaggtgcgtttggtttttttttcgttttgtggggtaggtttttagtggtttttcgggcgtacgtttggatattattgttcgtttcgtcgtcgttttttacggttttaaagatatacgttgtttgtatgtgtttttgggggacgatagtgttatatgtggatatattggttttagttcggattcgtttttgtttttttttgttcgtgtcgtcggaagtcgtttcgggttgtcggagttttcgggttttggagatgaaggtaggtttttgtttttgttaggaaggagggaggtagtgggtttatgggtcggtgtttttgtagtcgatagtacgttttgcggttttggggatttttttgtgtttcggcgagatttttttcgttttattgtattggaattttattttcgattatacgttgggatttattatcggattttaagaggagttcgcgtagtttagtcggtatttcgaagttttttttttagtgggaatcgaagtagaagagcgattaaggaggtttttattataggatttatgggttcgattatgggtttttcgtaggtttttttggtagttttttttttattcgtcgtttcgggttgcgttttcgtcgtcgtcgtcgtaatttttagtatcgtcgttttaggtttcgtagtcgtcgcgtcgtcgttattttttaaagggttcgtagtttgattttgcggagtaagggggggtggagcgggggagtcggtttcgttagcgcgtatgcgcgaggttcgagtcgtcgtttgggttatagtgaaagttatcgttgttcggggatgggtttttgatatttggggaagtaggagttttgtgtgatcgtgcgtttgagtttgggttgagattagttttggttagggtagttattaggacggttttcggaggtcgggattcgcggagggtttagtagtaggaagaaattttaggaggaagaaattttagatagatcgtcggcgaggtagcgcgggattttagttttaggcgtgcgcggacggtgtgcgggtgagtttttttaaaagtggagtttttgtgatgacgagtataggttcgtttgcgtgttcgtgggttgtttttttatcggtggtttttagtcgcggagagtagaattcggtagttttaggggttgtttgcgggagggtgttttttgttgtacgtgtgtgttcgttatgggtgtgtgtgtgtgtgtgttggggggggtgcgtttgtgtgtgtgtttgtgtgtgtgcgcgcgtagtgtttgtttgtgtgtcgatttttgttttttttttacgtttttttttttttttttttttttttttttttttttttttgttttttttttcgtttttttcgtggttttttttttttgtttttgttcgtttgtgtgtgcgtgcgtttcgggatatatgtgttttgtgcgtcggagggtgggttttttgtacgtcggttttttttttggttagttttttttcgcgtttttgtttgggtcgtgtggtcggttggtagtcgtcgtttcggcggttttagtttgggggtttgtgaaggtttgggtaacgtgggtatcggcgtcggattcgtaggggtttttattttttttttattcggagtagtttttttgttaggttggatttagacgagcgttttttaattaaggataacggttttttaggcgtttatcgtttattcgtaggagggtgttcgtagagttttaagaaggtggttgttacgtttgtcgttttttgtttttatcgagaaatgtagttatagttcgacgtagggacggagaaggaagtcggtaaggggatggggtaagtatgtttgttttttaaaggttggtttttttggtcgagttattcgtttgatattttttttcggatgtcggtggtggtggtatggttttttcgtattttgtttgggttttggtttttgttttgattttttttttgttgtgtttgtttcgtttttgagaagtttggcggttttttagtgtggtttagtgttttttataaagaagattttttcgtttattagggagaaatttcgtggcggttcgcgttatgattgtttttttttttatatttttttttggatgattgggtagttgtggtgattttggagttttgggtttttatatttgtgtgggatagggaagttttttgggtttttatggtttaagtgatggttgtacgttcggtttaggaagaggcggaggtaagtttatcgtttttgatattggttttttaggaaaggcggtgttgtattttatatgtattttttttttgatttttgagggttaatcgtttttttcgtttttggggaaagtgttttttagtatcgaattttttggttgttacggatgttagggagttaacgggattgggttttggttgggtgtaggggaggttgcgttaggggtatttagtcggcggcgggttgggggtggggtgtattttgtttaaattttttggtttttttggcgggtttttttgaacgtggcgtggattcgcgtataggttttgtttcgtaggtttttaggtgcgtttggtttttttttcgttttgtggggtaggtttttagtggtttttcgggcgtacgtttggatattattgttcgtttcgtcgtcgttttttacggttttaaagatatacgttgtttgtatgtgtttttgggggacgatagtgttatatgtggatatattggttttagttcggattcgtttttgtttttttttgttcgtgtcgtcggaagtcgtttcgggttgtcggagttttcgggttttggagatgaaggtaggtttttgtttttgttaggaaggagggaggtagtgggtttatgggtcggtgtttttgtagtcgatagtacgttttgcggttttggggatttttttgtgtttcggcgagatttttttcgttttattgtattggaattttattttcgattattcgttgggatttattatcggattttaagaggagttcgcgtagtttagtcggtatttcgaagttttttttttagtgggaatcgaagtagaagagcgattaaggaggtttttattataggatttttatgggttcgattttgggtttttcgtaggtttttttggtagttttttttttattcgtcgtttcgggttgcgttttcgtcgtcgtcgtcgtaatttttagtatcgtcgttttaggtttcgtagtcgtcgcgtcgtcgttattttttaaagggttcgtagtttgattttgcggagtaacggggggtggagcgggggagtcggtttcgttagcgcgtatgcgcgaggttcgagtcgtcgtttgggttatagtgaaagttatcgttgttcggggatgggtttttgatatttggggaagtaggagttttgtgtgatcgtgcgtttgagtttgggttgagattagttttggttagggtagttattaggacggttttcggaggtcgggattcgcggagggtttagtagtaggaagaaattttaggaggaagaaattttagatagatcgtcggcgaggtagcgcgggattttagttttaggcgtgcgcggacggtgtgcgggtgagtttttttaaaagtggagtttttgtgatgacgagtataggttcgtttgcgtgttcgtgggttgtttttttatcggtggtttttagtcgcggagagtagaattcggtagttttaggggttgtttgcgggagggtgttttttgttgtacgtgtgtgttcgttatgggtgtgtgtgtgtgtgtgttggggggggtgcgtttgtgtgtgtgtttgtgtgtgtgcgcgcgtagtgtttgtttgtgtgtcgatttttgttttttttttacgtttttttttttttttttttttttttttttttttttttttttttttttttgttttttttttcgtttttttcgtggttttttttttttgtttttgttcgtttgtgtgtgcgtgcgtttcgggatatatgtgttttgtgcgtcggagggtgggttttttgtacgtcggttttttttttggttagttttttttcgcgtttttgtttgggtcgtgtggtcggttggtagtcgtcgtttcggcggttttagtttgggggtttgtgaaggtttgggtaacgtgggtatcggcgtcggattcgtaggggtttttattttttttttattcggagtagtttttttgttaggttggatttagacgagcgttttttaattaaggataacggttttttaggcgtttatcgtttattcgtaggagggtgttcgtagagttttaagaaggtggttgttacgtttgtcgttttttgtttttatcgagaaatgtagttatagttcgacgtagggacggagaaggaagtcggtaaggggatggggtaagtatgtttgttttttaaaggttggtttttttggttgagttattcgtttgatattttttttcggatgtcggtggtggtggtatggttttttcgtattttgtttgggttttggtttttgttttgattttttttttgttgtgtttgtttcgtttttgagaagtttggcggttttttagtgtggtttagtgttttttataaagaagattttttcgtttattagggagaaatttcgtggcggttcgcgttatgtttgtttttttttttatatttttttttggatgattgggtagttgtggtgattttggagttttgggtttttatatttgtgtgggatagggaagttttttcggtttttatggtttaagtgatggttgtacgttcggtttaggaagaggcggaggtaagtttatcgtttttgatattggttttttaggaaaggcggtgttgtattttatttgtattttttttttgatttttgagagttaatcgtttttttcgtttttggggaaagtgttttttagtatcgaatgttttggttgttacggatgttagggagttaacgggattgggttttggttgggtgtaggggaggttgcgttaggggtatttagtcggcggcgggttgggggtggggtgtattttgtttaaatttttcggtttttttggcgggtttttttgaacgtggcgtggattcgcgtataggttttgtttcgtaggtttttaggtgcgtttggtttttttttcgttttgtggggtaggtttttagtggtttttcgggcgtacgtttggatattattgttcgtttcgtcgtcgttttttacggttttaaagatatacgttgtttgtatgtgtttttgggggacgatagtgttatatgtggatacgttggttttagttcggattcgtttttgtttttttttgttcgtgtcgtcggaagtcgtttcgggttgtcggagttttcgggttttggagatgaaggtaggtttttgtttttgttaggaaggagggaggtagtgggtttatgggtcggtgtttttgtagtcgatagtacgttttgcggttttggggatttttttgtgtttcggcgagatttttttcgttttattgtattggaattttattttcgattattcgttgggatttattatcggattttaagaggagttcgcgtagtttagtcggtatttcgaagttttttttttagtgggaatcgaagtagaagagcgattaaggaggtttttattataggatttttatgggttcgattatgggtttttcgtaggtttttttggtagttttttttttattcgtcgtttcgggttgcgttttcgtcgtcgtcgtcgtaatttttagtatcgtcgttttaggtttcgtagtcgtcgcgtcgtcgttattttttaaagggttcgtagtttgattttgcggagtaagggggggtggagcgggggagtcggtttcgttagcgcgtatgcgcgaggttcgagtcgtcgtttgggttatagtgaaagttatcgttgttcggggatgggtttttgatatttggggaagtaggagttttgtgtgatcgtgcgtttgagtttgggttgagattagttttggttagggtagttattaggacggttttcggaggtcgggattcgcggagggtttagtagtaggaagaaattttaggaggaagaaattttagatagatcgtcggcgaggtagcgcgggattttagttttaggcgtgcgcggacggtgtgcgggtgagtttttttaaaagtggagtttttgtgatgacgagtataggttcgtttgcgtgttcgtgggttgtttttttatcggtggtttttagtcgcggagagtagaattcggtagttttaggggttgtttgcgggagggtgttttttgttgtacgtgtgtgttcgttatgggtgtgtgtgtgtgtgtgttgggggggtgcgtttgtgtgtgtgtttgtgtgtgtgcgcgcgtagtgtttgtttgtgtgtcgatttttgttttttttttacgttttttttttttttttttttttttttttttttttttttttttttttttttttttcgtttttttcgtggttttttttttttgtttttgttcgtttgtgtgtgcgtgcgtttcgggatatatgtgttttgtgcgtcggagggtgggttttttgtacgtcggttttttttttggttagttttttttcgcgtttttgtttgggtcgtgtggtcggttggtagtcgtcgtttcggcggttttagtttgggggtttgtgaaggtttgggtaacgtgggtatcggcgtcggattcgtaggggtttttattttttttttattcggagtagtttttttgttaggttggatttagacgagcgttttttaattaaggataacggttttttaggcgtttatcgtttattcgtaggagggtgttcgtagagttttaagaaggtggttgttacgtttgtcgttttttgtttttatcgagaaatgtagttatagttcgacgtagggacggagaaggaagtcggtaaggggatggggtaagtatgtttgttttttaaaggttggtttttttggtcgagttattcgtttgatattttttttcggatgtcggtggtggtggtatggttttttcgtattttgtttgggttttggtttttgtttttattttttttttgttgtgtttgtttcgtttttgagaagtttggcggttttttagtgtggtttagtgttttttataaagaagattttttcgtttattagggagaaatttcgtggcggttcgcgttatgattgtttttttttttatatttttttttggatgattgggtagttgtggtgattttggagttttgggtttttatatttgtgtgggatagggaagttttttcggtttttatggtttaagtgatggttgtacgttcggtttaggaagaggcggaggtaagtttatcgtttttgatattggttttttaggaaaggcggtgttgtattttatttgtattttttttttgatttttgagggttaatcgtttttttcgtttttggggaaagtgttttttagtatcgaattttttggttgttacggatgttagggagttaacgggattgggttttggttgggtgtaggggaggttgcgttaggggtatttagtcggcggcgggttgggggtggggtgtattttgtttaaatttttcggtttttttggcgggtttttttgaacgtggcgtggattcgcgtataggttttgtttcgtaggtttttaggtgcgtttggtttttttttcgttttgtggggtaggtttttagtggtttttcgggcgtacgtttggatattattgttcgtttcgtcgtcgttttttacggttttaaagatatacgttgtttgtatgtgtttttgggggacgacggtgttatatgtggatatattggttttagttcggattcgtttttgtttttttttgttcgtgtcgtcggaagtcgtttcgggttgtcggagttttcgggttttggagatgaaggtaggtttttgtttttgttaggaaggagggaggtagtgggtttatgggtcggtgtttttgtagtcgatagtacgttttgcggttttggggatttttttgtgtttcggcgagatttttttcgttttattgtattggaattttattttcgattattcgttgggatttattatcggattttaagaggatattttaagaggagttcgcgtagtttagtcggtatttcgaagttttttttttagtgggaatcgaagtagaagagcgattaaggaggtttttattataggatttttatgggttcgattttgggtttttcgtaggtttttttggtagttttttttttattcgtcgtttcgggttgcgttttcgtcgtcgtcgtcgtaatttttagtatcgtcgttttaggtttcgtagtcgtcgcgtcgtcgttattttttaaagggttcgtagtttgattttgcggagtaagggggggtggagcgggggagtcggtttcgttagcgcgtatgcgcgaggttcgagtcgtcgtttgggttatagtgaaagttatcgttgttcggggatgggtttttgatatttggggaagtaggagttttgtgtgatcgtgcgtttgagtttgggttgagattagttttggttagggtagttattaggacggttttcggaggtcgggattcgcggagggtttagtagtaggaagaaattttaggaggaagaaattttagatagatcgtcggcgaggtagcgcgggattttagttttaggcgtgcgcggacggtgtgcgggtgagtttttttaaaagtggagtttttgtgatgacgagtataggttcgtttgcgtgttcgtgggcggtttttttatcgttggtttttagtcgcggagagtagaattcggtagttttaggggttgtttgcgggagggtgttttttgttgtacgtgtgtgttcgttatgggtgtgtgtgtttgtgtgttggggggggtgcgtttgtgtgtgtgcgcgcgtagtgtttgtttgtgtgcggatttttgttttttttttaggttttttttttttttttttttttttttttcgtttttttcgtggttttttttttttgtttttgttcgtttgtgtgtgcgtgcgtttcgggatatatgtgttttgtgcgtcggagggtgggttttttgtacgtcggttttttttttggttagttttttttcgcgtttttgtttgggtcgtgtggtcggttggtagtcgtcgtttcggcggttttagtttgggggtttgtgaaggtttgggtaacgtgggtatcggcgtcggattcgtaggggtttttattttttttttattcggagtagtttttttgttaggttggatttagacgagcgttttttaattaaggataacggttttttaggcgtttatcgtttattcgtaggagggtgttcgtagagttttaagaaggtggttgttacgtttgtcgttttttgtttttatcgagaaatgtagttatagttcgacgtagggacggagaaggaagtcggtaaggggatggggtaagtatgtttgttttttaaaggttggtttttttggtcgagttattcgtttgatattttttttcggatgtcggtggtggtggtatggttttttcgtattttgtttgggttttggtttttgttttgattttttttttgttgtgtttgtttcgtttttgagaagtttggcggttttttagtgtggtttagtgttttttataaagaagattttttcgtttattagggagaaatttcgtggcggttcgcgttatgtttgtttttttttttatatttttttttggatgattgggtagttgtggtgattttggagttttgggtttttatatttgtgtgggatagggaagttttttcggtttttatggtttaagtgatggttgtacgttcggtttaggaagaggcggaggtaagtttatcgtttttgatattggttttttaggaaaggcggtgttgtattttatttgtattttttttttgatttttgagggttaatcgtttttttcgtttttggggaaagtgttttttagtatcgaattttttggttgttacggatgttagggagttaacgggattgggttttggttgggtgtaggggaggttgcgttaggggtatttagtcggcggcgggttgggggtggggtgtattttgtttaaatttttcggtttttttggcgggtttttttgaacgtggcgtggattcgcgtataggttttgtttcgtaggtttttaggtgcgtttggtttttttttcgttttgtggggtaggtttttagtggtttttcgggcgtacgtttggatattattgttcgtttcgtcgtcgttttttacggttttaaagatatacgttgtttgtatgtgtttttgggggacgatagtgttatatgtggatatattggttttagttcggattcgtttttgtttttttttgttcgtgtcgtcggaagtcgtttcgggatgtcggagttttcgggttttggagatgaaggtaggtttttgtttttgttaggaaggagggaggtagtgggtttatgggtcggtgtttttgtagtcgatagtacgttttgcggttttggggatttttttgtgtttcggcgagatttttttcgttttattgtattggaattttattttcgattattcgttgggatttatcgtcggattttaagaggagttcgcgtagtttagtcggtatttcgaagttttttttttagcgggaacggaagtagaagagcgattaaggaggtttttattataggatttttatgggttcgattttgggtttttcgtaggtttttttggtagttttttttttattcgtcgtttcgggttgcgtcgtcgtcgtcgtcgtcgtaatttttagtatcgtcgttttaggtttcgtagtcgtcgcgtcgtcgttattttttaaagggttcgtagtttgattttgcggagtaagggggggtggagcggggggagtcggtttcgttagcgcgtaggcgcgaggttcgagtcgtcgtttgggttatagtgaaagttatcgttgttcggggatgggtttttgatatttggggaagtaggagttttgtgtgatcgtgcgtttgagtttgggttgagattagttttggttagggtagttattaggacggttttcggaggtcgggattcgcggagggtttagtagtaggaagaaattttaggaggaagaaattttagatagatcgtcggcgaggtagcgcgggattttagtttttggcgtgcgcggacggtgtgcgggtgagtttttttaaaagtggagtttttgtgatgacgagtataggttcgtttgtgtgttcgtgggttgtttttttatcggtggttcgtagtcgcg

SEQ ID NO: 151 - DNA, 17968 bp, Artificial Sequence
  chemically treated genomic DNA (Homo sapiens)
cgcgattacgagttatcggtgagagagtagtttacgggtatataggcggatttgtgttcgttattataagggttttatttttggggagatttattcgtatatcgttcgcgtacgttagaggttgggatttcgcgttgtttcgtcggcgatttgtttgaggttttttttttttggggtttttttttgttgttggatttttcgcgaatttcggttttcggagatcgttttggtaattgttttggttaggattggttttagtttagatttagacgtacgattatatagggtttttatttttttaagtgttagggatttattttcgggtaacggtggtttttattgtgatttaagcggcggttcgggtttcgcgtttgcgcgttggcgaggtcgatttttttcgttttatttttttttatttcgtagagttaggttgcggattttttaaaaaatggcggcgacgcggcggttgcggggtttggggcggcggtgttggaggttgcggcggcggcggcggcggcgtagttcgaggcgacgggtgggaagaggattgttagaggggtttgcgggagatttagggtcggatttataggagttttgtggtgaggatttttttgatcgtttttttgttttcgttttcgttgaaggaggagtttcggggtgtcggttgggttgcgcggattttttttggggttcgacgatggattttagcgggtgatcgggaatggggttttaatgtagtgaggcggaaagggtttcgtcggggtataggaagatttttagggtcgtaaggcgtgttgtcggttgtaaaggtatcgatttatgagtttattgttttttttttttttggtaggagtaggggtttgtttttatttttaaggttcgagggtttcggtatttcgaggcggttttcggcgatacgggtaaagagagatagaggcgagttcgagttggagttagtgtgtttatatgtggtattgtcgttttttaagagtatatgtaggtagcgtgtgtttttgaggtcgtagggggcgacgacgagacggatagtgatgtttaggcgtgcgttcggggggttattggagatttgttttataaagcggaggaaaagttaagcgtatttgaaaatttgcgagatagggtttgtgcgcgagtttacgttacgtttagggaggttcgttagaggagtcgagaggtttggataaagtatattttatttttagttcgtcgtcggttaggtatttttgacgtaattttttttgtatttagttaaaatttagtttcgttggttttttgatattcgtggtagttaaaagattcggtgttagaaggtattttttttaggagcggaggaagcggttggtttttaagaattagagaggaagtgtaggtgggatgtaatatcgttttttttagaaggttaatgttaggagcggtgggtttgttttcgtttttttttggatcgagcgtgtagttattatttgggttatggagatcgagagagtttttttgttttatataggtatggaagtttagagttttaggattattatagttgtttaattatttagaaagaggtgtggagagggaaataagtatgacgcggatcgttacgaggtttttttttgatggacggggaagttttttttgtggaagatattgagttatattaagaagtcgttaggttttttagagacggggtagatatagtaagagggaggttagagtagaggttagagtttaggtaggatacgggggggttatgttattattatcggtattcggggaggagtgttaaacgggtgattcggttaggaaggttagtttttgagagatagatatgtttgttttatttttttgtcggttttttttttcgtttttgcgtcgagttgtggttatatttttcgatgagggtagagggcgataggcgtgataattatttttttgaagttttgcgggtatttttttgcgggtggacgatgagcgtttgggaggtcgttgtttttggttggggagcgttcgtttggatttagtttagtaaagaggttgtttcggatggggaggggatgaaaatttttgcgggttcgacgtcgatgtttacgttgtttaggtttttatagatttttaaattggaatcgtcgggacgacgattgttaatcggttatacgatttaggtagagacgcggggagaggttgattagaagaaaggtcgacgtgtaagaaatttatttttcggcgtatagggtatatgtgtttcgaggcgtacgtatatatagacggatagagatagaaagagagggttacggaaagagcgagaagggagagagagagagagagagagatttgagagagagatagaagttcgtatatagataggtattgcgcgcgtatatatatagacgtattttttttaatatataaatatatatatttatgacgaatatatacgtatagtagggaatattttttcgtaggtagtttttgaagttgtcgggttttgtttttcgcgattgagagttagcggtgagagagtcgtttacgggtacgtaggcggatttgtgttcgttattataagggttttatttttggggagatttattcgtatatcgttcgcgtacgtttgaggttgggatttcgcgttgtttcgtcggcgatttgtttgaggttttttttttttggggtttttttttgttgttggatttttcgcgaatttcggttttcggagatcgttttggtaattgttttggttaggattggttttagtttagatttagacgtacgattatatagggtttttatttttttaagtgttagggatttattttcgggtaacggtggtttttattgtgatttaagcggcggttcgggtttcgcgtatgcgcgttggcgaggtcgattttttcgttttatttttttttatttcgtagagttaggttgcggattttttaaaaaatggcggcgacgcggcggttgcggggtttggggcggcggtgttggaggttgcggcggcggcggcgaaggcgtagttcgaggcggcgggtgggaagaggattgttagaggggtttgcgggagatttagggtcggatttataggagttttgtggtgaggatttttttgatcgtttttttgtttcggtttttattgaaggaggagtttcggggtgtcggttgggttgcgcggattttttttggggtgtttttttggggttcgatgatggattttagcgggtgatcgggaatggggttttaatgtagtgaggcggaaagggtttcgtcggggtataggaagatttttagggtcgtaaggcgtgttgtcggttgtaaaggtatcgatttatgagtttattgttttttttttttttggtaggagtaggggtttgtttttatttttaaggttcgagggtttcggtaattcgaggcggttttcggcgatacgggtaaagagagatagaggcgagttcgagttggagttagtgtgtttatatgtggtatcgtcgttttttaagagtatatgtaggtagcgtgtgtttttgaggtcgtagggggcgacgacgagacggatagtgatgtttaggcgtgcgttcggggggttattggagatttgttttataaagcggaggaaaagttaagcgtatttgaaaatttgcgagatagggtttgtgcgcgagtttacgttacgtttagggaggttcgttagaggagtcgagaggtttggataaagtatattttatttttagttcgtcgtcggttaggtatttttgacgtaattttttttgtatttagttaaaatttagtttcgttggttttttgatattcgtggtagttaaaagattcggtgttagaaggtattttttttaggagcggaggaagcggttggtttttaagaattagagaggaagtgtaggtgggatgtaatatcgttttttttagaaggttaatgttaggagcggtgggtttgttttcgtttttttttggatcgagcgtgtagttattatttgggttatggagatcgagagagtttttttgttttatataggtatggaagtttagagttttaggattattatagttgtttaattatttagaaagaggtgtggagagggaaataattatgacgcggatcgttacgaggtttttttttgatggacggggaagttttttttgtggaagatattgagttatattaagaagtcgttaggttttttagagacggggtagatatagtaagagggaggtgagagtagaggttagagtttaggtaggatacgggggggttatgttattattatcggtattcggggaggagtgttaaacgggtgattcggttaggaaggttagtttttgagagatagatatgtttgttttatttttttgtcggttttttttttcgtttttgcgtcgagttgtggttatatttttcgatgagggtagagggcgataggcgtgataattatttttttgaagttttgcgggtatttttttgcgggtggacgatgagcgtttgggaggtcgttgtttttggttggggagcgttcgtttggatttagtttagtaaagaggttgtttcggatggggaggggatgaaaatttttgcgggttcgacgtcgatgtttacgttgtttaggtttttatagatttttaaattggaatcgtcgggacgacgattgttaatcggttatacgatttaggtagagacgcggggagaggttgattagaagaaaggtcgacgtgtaagaaatttatttttcggcgtatagggtatatgtgtttcgaggcgtacgtatatatagacggatagagatagaaagagagggttacggaaagagcgagaagggagagagggagagggagagagagagagagagagagagagagagagagacgtgagagagagatagaagtcggtatatagataggtattgcgcgcgtatatatatagatatatatatagacgtatttttttaatatatatatatatatatttatgacgaatatatacgtatagtagggaatattttttcgtaggtagtttttgaagttgtcgggttttgtttttcgcgattgagagttatcggtgagagagtagtttacgggtacgtaggcggatttgtgttcgttattataagggttttatttttggggagatttattcgtatatcgttcgcgtacgtttgaggttgggatttcgcgttgtttcgtcggcgatttgtttgaggttttttttttttggggtttttttttgttgttggatttttcgcgaatttcggttttcggagatcgttttggtaattgttttggttaggattggttttagtttagatttagacgtacgattatatagggtttttatttttttaagtgttagggatttattttcgggtaacggtggtttttattgtgatttaagcggcggttcgggtttcgcgtatgcgcgttggcgaggtcgattttttcgttttatttttttttatttcgtagagttaggttgcggattttttaaaaaatggcggcgacgcggcggttgcggggtttggggcggcggtgttggaggttgcggcggcggcggcgaaggcgtagttcgaggcggcgggtggggagaggattgttagaggggtttgcgggagatttatggtcggatttataggagttttgtggtgaggatttttttgatcgtttttttgtttcggtttttattgaaggaggagtttcggggtgtcggttgggttgcgcggattttttttggggttcgatgatggattttagcgggtgatcgggaatggggttttaatgtagtgaggcggaaagggtttcgtcggggtataggaagatttttagggtcgtaaggcgtgttgtcggttgtaaaggtatcgatttatgagtttattgttttttttttttttggtaggagtaggggtttgtttttatttttaaggttcgagggtttcggtaattcgaggcggttttcggcgatacgggtaaagagagatagaggcgagttcgagttggagttagcgtgtttatatgtggtattgtcgttttttaagagtatatgtaggtagcgtgtgtttttgaggtcgtagggggcgacgacgagacggatagtgatgtttaggcgtgcgttcggggggttattggagatttgttttataaagcggaggaaaagttaagcgtatttgaaaatttgcgagatagggtttgtgcgcgagtttacgttacgtttagggaggttcgttagaggagtcgagaggtttggataaagtatattttatttttagttcgtcgtcggttaggtatttttgacgtaattttttttgtatttagttaaaatttagtttcgttggttttttgatattcgtggtagttaaaatattcggtgttagaaggtattttttttaggagcggaggaagcggttggtttttaagaattagagaggaagtgtaggtgggatgtaatatcgttttttttagaaggttaatgttaggagcggtgggtttgttttcgtttttttttggatcgagcgtgtagttattatttgggttatggagatcgagagagtttttttgttttatataggtatggaagtttagagttttaggattattatagttgtttaattatttagaaagaggtgtggagagggaaataagtatgacgcggatcgttacgaggtttttttttgatggacggggaagttttttttgtggaagatattgagttatattaagaagtcgttaggttttttagagacggggtagatatagtaagagggaggttagagtagaggttagagtttaggtaggatacgggggggttatgttattattatcggtattcggggaggagtgttaaacgggtgatttagttaggaaggttagtttttgagagatagatatgtttgttttatttttttgtcggttttttttttcgtttttgcgtcgagttgtggttatatttttcgatgagggtagagggcgataggcgtgataattatttttttgaagttttgcgggtatttttttgcgggtggacgatgagcgtttgggaggtcgttgtttttggttggggagcgttcgtttggatttagtttagtaaagaggttgtttcggatggggaggggatgaaaatttttgcgggttcgacgtcgatgtttacgttgtttaggtttttatagatttttaaattggaatcgtcgggacgacgattgttaatcggttatacgatttaggtagagacgcggggagaggttgattagaagaaaggtcgacgtgtaagaaatttatttttcggcgtatagggtatatgtgtttcgaggcgtacgtatatatagacggatagagatagaaagagagggttacggaaagagcgagaagggagatagagagagagagagagagagagagagagagagagagagagagagagagacgtgagagagagatagaagtcggtatatagataggtattgcgcgcgtatatatatagatatatatatagacgtattttttttaatatatatatatatatatttatgacgaatatatacgtatagtagggaatattttttcgtaggtagtttttgaagttgtcgggttttgtttttcgcgattgagagttatcggtgagagagtagtttacgggtacgtaggcggatttgtgttcgttattataagggttttatttttggggagatttattcgtatatcgttcgcgtacgtttgaggttgggatttcgcgttgtttcgtcggcgatttgtttgaggttttttttttttggggtttttttttgttgttggatttttcgcgaatttcggttttcggagatcgttttggtaattgttttggttaggattggttttagtttagatttagacgtacgattatatagggtttttatttttttaagtgttagggatttattttcgggtaacggtggtttttattgtgatttaagcggcggttcgggtttcgcgtatgcgcgttggcgaggtcgattttttcgttttatttttcgttatttcgtagagttaggttgcggattttttaaaaaatggcggcgacgcggcggttgcggggtttggggcggcggtgttggaggttgcggcggcggcggcgaaggcgtagttcgaggcggcgggtgggaagaggattgttagaggggtttgcgggagatttagggtcggatttataggagttttgtggtgaggatttttttgatcgtttttttgtttcggtttttattgaaggaggagtttcggggtgtcggttgggttgcgcggattttttttggggttcgatgatggattttagcgggtgatcgggaatggggttttaatgtagtgaggcggaaagggtttcgtcggggtataggaagatttttagggtcgtaaggcgtgttgtcggttgtaaaggtatcgatttatgagtttattgttttttttttttttggtaggagtaggggtttgtttttatttttaaggttcgagggtttcggtaattcgaggcggttttcggcgatacgggtaaagagagatagaggcgagttcgagttggagttagtgtgtttatatgtggtattgtcgttttttaagagtatatgtaggtagcgtgtgtttttgaggtcgtagggggcgacgacgagacggatagtgatgtttaggcgtgcgttcggggggttattggagatttgttttataaagcggaggaaaagttaagcgtatttgaaaatttgcgagatagggtttgtgcgcgagtttacgttacgtttagggaggttcgttagaggagttaagaggtttggataaagtatattttatttttagttcgtcgtcggttaggtatttttgacgtaattttttttgtatttagttaaaatttagtttcgttggttttttgatattcgtggtagttaaaagattcggtgttagaaggtattttttttaggagcggaggaagcggttggtttttaagaattagagaggaagtgtatgtgggatgtaatatcgttttttttagaaggttaatgttaggagcggtgggtttgttttcgtttttttttggatcgagcgtgtagttattatttgggttatggagatttagagagtttttttgttttatataggtatggaagtttagagttttaggattattatagttgtttaattatttagaaagaggtgtggagagggaaataattatgacgcggatcgttacgaggtttttttttgatggacggggaagttttttttgtggaagatattgagttatattaagaagtcgttaggttttttagaggcggggtagatatagtaagagggaggttagagtagaggttagagtttaggtaggatacgggggggttatgttattattatcggtattcggggaggagtgttaaacgggtgattcggttaggaaggttagtttttgagagatagatatgtttgttttatttttttgtcggttttttttttcgtttttgcgtcgagttgtggttatatttttcgatgagggtagagggcgataggcgtgataattatttttttgaagttttgcgggtatttttttgcgggtggacgatgagcgtttgggaggtcgttgtttttggttggggagcgttcgtttggatttagtttagtaaagaggttgtttcggatggggaggggatgaaaatttttgcgggttcgacgtcgatgtttacgttgtttaggtttttatagatttttaaattggaatcgtcgggacgacgattgttaatcggttatacgatttaggtagagacgcggggagaggttgattagaagaaaggtcgacgtgtaagaaatttatttttcggcgtatagggtatatgtgtttcgaggcgtacgtatatatagacggatagagatagaaagagagggttacggaaagagcgagaagggagatagagagagagagagagagagagagagagagagagagagacgtgagagagagatagaagtcggtatatagataggtattgcgcgcgtatatatatagatatatatatagacgtattttttttaatatatatatatatatatttatgacgaatatatacgtatagtagggaatattttttcgtaggtagtttttgaagttgtcgggttttgtttttcgcgattgagagttatcggtgagagagtagtttacgggtacgtaggcggatttgtgttcgttattataagggttttatttttggggagatttattcgtatatcgttcgcgtacgtttgaggttgggatttcgcgttgtttcgtcggcgatttgtttgaggttttttttttttggggtttttttttgttgttggatttttcgcgaatttcggttttcggagatcgttttggtaattgttttggttaggattggttttagtttagatttagacgtacgattatatagggtttttatttttttaagtgttagggatttattttcgggtaacggtggtttttattgtgatttaagcggcggttcgggtttcgcgtatgcgcgttggcgaggtcgattttttcgttttatttttttttatttcgtagagttaggttgcggattttttaaaaaatggcggcgacgcggcggttgcggggtttggggcggcggtgttggaggttgcggcggcggcggcgaaggcgtagttcgaggcggcgggtgggaagaggattgttagaggggtttgcgggagatttatggtcggatttatgagttttgtggtgaggatttttttgatcgtttttttgtttcggtttttattgaaggaggagtttcggggtgtcggttgggttgcgcggattttttttggggttcgatgatggattttagcgtgtgatcgggaatggggttttaatgtagtgaggcggaaagggtttcgtcggggtataggaagatttttagggtcgtaaggcgtgttgtcggttgtaaaggtatcgatttatgagtttattgttttttttttttttggtaggagtaggggtttgtttttatttttaaggttcgagggtttcggtaattcgaggcggttttcggcgatacgggtaaagagagatagaggcgagttcgagttggagttagtgtgtttatatgtggtattgtcgttttttaagagtatatgtaggtagcgtgtgtttttgaggtcgtagggggcgacgacgagacggatagtgatgtttaggcgtgcgttcggggggttattggagatttgttttataaagcggaggaaaagttaagcgtatttgaaaatttgcgagataggggtttgtgcgcgagtttacgttacgtttagggaggttcgttagaggagtcgagaggtttggataaagtatattttatttttagttcgtcgtcggttaggtatttttgacgtaattttttttgtatttagttaaaatttagtttcgttggttttttgatattcgtggtagttaaaatattcggtgttagaaggtattttttttaggagcggaggaagcggttggtttttaagaattagagaggaagtgtaggtgggatgtaatatcgttttttttagaaggttaatgttaggagcggtgggtttgttttcgtttttttttggatcgagcgtgtagttattatttgggttatggagatcgagagagtttttttgttttatataggtatggaagtttagagttttaggattattatagttgtttaattatttagaaagaggtgtggagagggaaataattatgacgcggatcgttacgaggtttttttttgatggacggggaagttttttttgtggaagatattgagttatattaagaagtcgttaggttttttagaggcggggtagatatagtaagagggaggttagagtagaggttagagtttaggtaggatacgggggggttatgttattattatcggtattcggggaggagtgttaaacgggtgattcggttaggaaggttagtttttgagagatagatatgtttgttttatttttttgtcggttttttttttcgtttttgcgtcgagttgtggttatatttttcgatgagggtagagggcgataggcgtgataattatttttttgaagttttgcgggtatttttttgcgggtggacgatgagcgtttgggaggtcgttgtttttggttggggagcgttcgtttggatttagtttagtaaagaggttgtttcggatggggaggggatgaaaatttttgcgggttcgacgtcgatgtttacgttgtttaggtttttatagatttttaaattggaatcgtcgggacgacgattgttaatcggttatacgatttaggtagagacgcggggagaggttgattagaagaaaggtcgacgtgtaagaaatttatttttcggcgtatagggtatatgtgtttcgaggcgtacgtatatatagacggatagagatagaaagagagggttacggaaagagcgagaagggagatagagagagagagagcgagagagagagagagagagagagagagagagagagagagagagacgtgagagagagatagaagtcggtatatagataggtattgcgcgcgtatatatatagatatatatatagacgtattttttttaatatatatatatatatatttatgacgaatatatacgtatagtagggaatattttttcgtaggtagtttttgaagttgtcgggttttgtttttcgcgattgagagttatcggtgagagagtagtttacgggtacgtaggcggatttgtgttcgttattataagggttttatttttggggagatttattcgtatatcgttcgcgtacgtttgaggttgggatttcgcgttgtttcgtcggcgatttgtttgaggttttttttttttggggtttttttttgttgttggatttttcgcgaatttcggttttcggagatcgttttggtaattgttttggttaggattggttttagtttagatttagacgtacgattatatagggtttttatttttttaagtgttagggatttattttcgggtaacggtggtttttattgtgatttaagcggcggttcgggtttcgcgtatgcgcgttggcgaggtcgattttttcgttttatttttttttatttcgtagagttaggttgcggattttttaaaaaatggcggcgacgcggcggttgcggggtttggggcggcggtgttggaggttgcggcggcggcggcgaaggcgtagttcgaggcggcgggtggggagaggattgttagaggggtttgcgggagatttatggtcggatttataggagttttgtggtgaggatttttttgatcgtttttttgtttcggtttttattgaaggaggagtttcggggtgtcggttgggttgcgcggattttttttggggttcgatgatggattttagcgggtgatcgggaatggggttttaatgtagtgaggcggaaagggtttcgtcggggtataggaagatttttagggtcgtaaggcgtgttgtcggttgtaaaggtatcgatttatgagtttattgttttttttttttttggtaggagtaggggtttgtttttatttttaaggttcgagggtttcggtaattcgaggcggttttcggcgatacgggtaaagagagatagaggcgagttcgagttggagttagtgtgtttatatgtggtattgtcgttttttaagagtatatgtaggtagcgtgtgtttttgaggtcgtagggggcgacgacgagacggatagtgatgtttaggcgtgcgttcggggggttattggagatttgttttataaagcggaggaaaagttaagcgtatttgaaaatttgcgagatagggtttgtgcgcgagtttacgttacgtttagggaggttcgttagaggagtcgagaggtttggataaagtatattttatttttagttcgtcgtcggttaggtatttttgacgtaattttttttgtatttagttaaaatttagtttcgttggtttttgatattcgtggtagttaaaagattcggtgttagaaggtattttttttaggagcggaggaagcggttggtttttaagaattagagaggaagtgtaggtgggatgtaatatcgttttttttagaaggttaatgttaggagcggtgggtttgttttcgtttttttttggatcgagcgtgtagttattatttgggttatggagatcgagagagtttttttgttttatataggtatggaagtttagagttttaggattattatagttgtttaattatttagaaagaggtgtggagagggaaataattatgacgcggatcgttacgaggtttttttttgatggacggggaagttttttttgtggaagatattgagttatattaagaagtcgttaggttttttagagacggggtagatatagtaagagggaggttagagtagaggttagagtttaggtaggatacgggggggttatgttattattatcggtattcggggaggagtgttaaacgggtgattcggttaggaaggttagtttttgagagatagatatgtttgttttatttttttgtcggttttttttttcgtttttgcgtcgagttgtggttatatttttcgatgagggtagagggcgataggcgtgataattatttttttgaagttttgcgggtatttttttgcgggtggacgatgagcgtttgggaggtcgttgtttttggttggggagcgttcgtttggatttagtttagtaaagaggttgtttcggatggggaggggatgaaaatttttgcgggttcgacgtcgatgtttacgttgtttaggtttttatagatttttaaattggaatcgtcgggacgacgattgttaatcggttatacgatttaggtagagacgcggggagaggttgattagaagaaaggtcgacgtgtaagaaatttatttttcggcgtatagggtatatgtgtttcgaggcgtacgtatatatagacggatagagatagaaagagagggttacggaaagagcgagaagggagatagagagagagagagagagagagagagagagagagagacgtgagagagagatagaagtcggtatatagataggtattgcgcgcgtatatatatagatatatatatagacgtattttttttaatatatatatatatatatttatgacgaatatatacgtatagtagggaatattttttcgtaggtagtttttgaagttgtcgggttttgtttttcgcgattgagagttatcggtgagagagtagtttacgggtacgtaggcggatttgtgttcgttattataagggttttatttttggggagatttattcgtatatcgttcgcgtacgtttgaggttgggatttcgcgttgtttcgtcggcgatttgtttgaggttttttttttttggggtttttttttgttgttggatttttcgcgaatttcggttttcggagatcgttttggtaattgttttggttaggattggttttagtttagatttagacgtacgattatatagggtttttatttttttaagtgttagggatttattttcgggtaacggtggtttttattgtgatttaagcggcggttcgggtttcgcgtatgcgcgttggcgaggtcgattttttcgttttatttttttttatttcgtagagttaggttgcggattttttaaaaaatggcggcgacgcggcggttgcggggtttggggcggcggtgttggaggttgcggcggcggcggcgaaggcgtagttcgaggcggcgggtggggagaggattgttagaggggtttgcgggagatttatggtcggatttataggagttttgtggtgaggatttttttgatcgtttttttgtttcggtttttattgaaggaggagtttcggggtgtcggttgggttgcgcggattttttttggggttcgatgatggattttagcgggtgatcgggaatggggttttaatgtagtgaggcggaaagggtttcgtcggggtataggaagatttttagggtcgtaaggcgtgttgtcggttgtaaaggtatcgatttatgagtttattgttttttttttttttggtaggagtaggggtttgtttttatttttaaggttcgagggtttcggtaattcgaggcggttttcggcgatacgggtaaagagagatagaggcgagttcgagttggagttagtgtgtttatatgtggtattgtcgttttttaagagtatatgtaggtagcgtgtgtttttgaggtcgtagggggcgacgacgagacggatagtgatgtttaggcgtgcgttcggggggttattggagatttgttttataaagcggaggaaaagttaagcgtatttgaaaatttgcgagatagggtttgtgcgcgagtttacgttacgtttagggaggttcgttagaggagtcgagaggtttggataaagtatattttatttttagttcgtcgtcggttaggtatttttgacgtaattttttttgtatttagttaaaatttagtttcgttggttttttgatattcgtggtagttaaaagattcggtgttagaaggtattttttttaggagcggaggaagcggttggtttttaagaattagagaggaagtgtaggtgggatgtaatatcgttttttttagaaggttaatgttaggagcggtgggtttgttttcgtttttttttggatcgagcgtgtagttattatttgggttatggagatcgagagagtttttttgttttatataggtatggaagtttagagttttaggattattatagttgtttaattatttagaaagaggtgtggagagggaaataattatgacgcggatcgttacgaggtttttttttgatggacggggaagttttttttgtggaagatattgagttatattaagaagtcgttaggttttttagagacggggtagatatagtaagagggaggttagagtagaggttagagtttaggtaggatacgggggggttatgttattattatcggtattcggggaggagtgttaaacgggtgattcggttaggaaggttagtttttgagagatagatatgtttgttttatttttttgtcggttttttttttcgtttttgcgtcgagttgtggttatatttttcgatgagggtagagggcgataggcgtgataattatttttttgaagttttgcgggtatttttttgcgggtggacgatgagcgtttgggaggtcgttgtttttggttggggagcgttcgtttggatttagtttagtaaagaggttgtttcggatggggaggggatgaaaatttttgcgggttcgacgtcgatgtttacgttgtttaggtttttatagatttttaaattggaatcgtcgggacgacgattgttaatcggttatacgatttaggtagagacgcggggagaggttgattagaagaaaggtcgacgtgtaagaaatttatttttcggcgtatagggtatatgtgtttcgaggcgtacgtatatatagacggatagagatagaaagagagggttacggaaagagcgagaagggagatagagagagagagagagagagagagagagagacgtgagagagagatagaagtcggtatatagataggtattgcgcgtgtatatatatagatatatatatagacgtatttttttaatatatatatatatatatttatgacgaatatatacgtatagtagggaatattttttcgtaggtagtttttgaagttgtcgggttttgtttttcgcgattgagagttatcggtgagagagtagtttacgggtacgtaggcggatttgtgttcgttattataagggttttatttttggggagatttatttcgtatatcgttcgcgtacgtttgaggttggatttcgcgttgtttcgtcggcgatttgtttgaggttttttttttttggggtttttttttgttgttggatttttcgcgaatttcggttttcggagatt

SEQ ID NO: 152 - DNA, 2730 bp, Artificial Sequence
  chemically treated genomic DNA (Homo sapiens)
gtttttattcgcgcgtttacgtgcgtggataaacgcgggaattcggtagtttttaacgttattttgtagagattttcgggttgtgagagagttggggtgtgcggcgggggaggggagggtttgatatttttaggttgagagttaagttttgggggagcggtatgggcgggggtggtcggggggaggcggaggatggagcgcgaattagaaagcgtagaggattttcggttcgcgtcgtattcgttgtgattagttttagaggcgcgattcgggagggcggatttttttttaatttttattgtttttttttttttttttttttttaaaagacgttttgcgggtagagttgttagtaatttcgcggtcgtttgtatttggtcgcggcggagttgatttttgtttttgtgatagataggggttggggttgagcggtcgtttgtttggggtattcgtacgtggggaataaatttttttttttcggtttttttcgggattcggcgatcgttataggttgggattttgtgcggcgttggagttggtagtttcgggcgttatggtttttttgaggagtggggagggaggtggtcggggggttggcgcgtttttcgcgcggggagcgttatgagtcgggcgaagggcggtagcgatagttttagtaattgtttttgtcggcgtttttcgtaggttttcgttaattcgtttcgcgtattatgttgattttcggtttgcggaattcgtagtgtagtttttgtcgttttttcggtttttgttattttacgtaggattggtttcggtcgtcggggttagtagtttgcgacgtgtttttggggaggcggaatcgttgtgcgttttgagttcgggtttagtttttcgttttttagttgcgttttgttttcggtcgtttagggagtttagtggcgatgagggtattgttggcgttttgttttttttttggttggttgcgttggggttcggcgggcgtttagtagttcggagagtattgttacggttgggtggacgtgtagggtaattattacgagggtttttagtgtttagaggatttcgatacgttggacgttattatttgttgcggtttttgcgcgtttcgttattgttgcgtcgcggtcgacgttaggttggagtagggcggttgtattaacgatcgtcgcgaattggagtatttaggtattattgcgcgtaagtgcggggttttcggggatatattttcgttcgtttaacggcggcggttgtatgtgtgcgcgggaggatgtatagatttaggtaggtttatgcgtttttttgggtttgtgcgttagggggacgcggtcgggtgggggaattaagggatgagtgggtggtcgcgttttagattatggttttttatttatttgtagtttcgtttttcgttatttgcggtttttgcgggtcggttcgtagggaaagtttgttagggatagtgaggagcgcggggtttgtgtttggtagtcggggggaagatagttggagttttcgggagaagggtagtgcgggtaaagttagggtagatttgggttttggtggaggggtcgagggtgttttattgttcgtttttgttatttcgggagtttcgggaagtgtcgaatgtagggaatcgcgatttttgtcgcgcgtttatttgtagttttttagggttaagaaattttagttattttttttttttgttttaatgatagcgtttttaagttacggtttcgttttgtagatttttttttaattttttgtatcgaattatttttttcggtttattttttattgttacgttttttagaaatgtttaggttttcgaggtggagatttagaaataagggtcgaaggggttttttcgttttttatttttatttcggaaaatacgggttaaattttcgttgattttagagcggaataaattacgattttagtagagaaaatttatattttgaaaaaaagttttttatttgaatcggaatattagggaaacgttttagagtttgaggcgagggttttatggttagggaaatcggagaagcgggcggagttgagagcgggtgatattttaggattttagagagtcgaggtttggagttcgtaagagaaggtcgtcgggaaagggaagagaggttggagagattattaagggttttttaacggttttttttcgtaaattgataatttagaggataggggagtttgttttttattagtgttttattagagggtgaatgttgggggttaatatttttaatttagaggattttggaagtagttttggagaaaagatgtttagcggaaagtagggaaatttaggtttttttggtttgttagaaaaatatagatttttttttacggttttattcgtttattttgggggatttagttgttttttgggagtaagtgtaattgtttagtttgtagtacgggttttttttgcgttttttattcggttcggatgttagaggatagtagaagggagaggtagtttttatatttattgagtttgggattaggtaaattttgatggattttggttttgttatttgtcggcggtgtaatttgggtaagttatttaattgttttggatatttttttttagttttaaagtgggtatattgtttttaaaggagttaagttgttggtgacgtgagagtgtatgaatgttggagcgtagggtttagtaaatggtagttatttatttttgttttgttttgtacgttg

SEQ ID NO: 153 - DNA, 2730 bp, Artificial Sequence
  chemically treated genomic DNA (Homo sapiens)
tagcgtgtaaggtaaggtaaaggtaagtaattattatttattgagttttgcgttttagtatttatatatttttacgttattaataatttaatttttttgagagtaatatgtttattttagaattgagaagaggtatttagagtagttaagtaatttgtttaagttatatcgtcggtaagtgatagagttaaggtttattagggtttgtttgattttagatttagtgagtgtggagattgttttttttttttgttgttttttggtattcgagtcgagtagggagcgtagaggaagttcgtgttgtagattgggtaattgtatttatttttagagggtagttgggttttttagggtgagcgagtgaagtcgtggggaagagtttatatttttttaataggttaggagggtttagatttttttatttttcgttgagtattttttttttagaattatttttagaattttttagattggaaatgttgatttttaatatttattttttagtggagtattaatggagggtagatttttttgttttttgggttattagtttgcggggaggggtcgttggggaatttttaatgatttttttagttttttttttttttttcggcgatttttttttgcgggttttagatttcggttttttggagttttggggtgttattcgtttttagtttcgttcgttttttcggtttttttggttataaaattttcgttttaagttttaaagcgtttttttgatgtttcgatttaggtggaaaatttttttttaaggtgtaaattttttttgttggggtcgtgatttatttcgttttgaagttagcggaaatttgattcgtgtttttcgaagtgagaatagggggcggggaagttttttcgatttttgtttttaaatttttatttcgaagatttgggtatttttgaaaggcgtgataatagggggtgggtcggagagggtaattcgatgtagagaattgaaaggaagtttgtagaacggggtcgtggtttagaaacgttattattaagatagaaaaaaaaagtgattggggttttttagttttgaagggttgtaaatgagcgcgcgataagagtcgcgattttttgtattcggtatttttcgaagttttcgaagtgataagggcgagtaatgggatattttcggtttttttattaaaatttaagtttattttggttttattcgtattatttttttttcgggagttttagttgtttttttttcggttattaggtataagtttcgcgttttttattgtttttggtaaattttttttgcgggtcgattcgtagagatcgtaagtggcgggaagcgggattgtaaatgaatagaggattatgatttgaaacgcgattatttatttattttttgatttttttattcggtcgcgtttttttggcgtatagatttaggaaggcgtatagatttgtttgggtttgtgtattttttcgcgtatatatgtagtcgtcgtcgttaggcgggcggggatatgttttcgagggtttcgtatttacgcgtagtgatgtttgggtgttttagttcgcggcggtcgttggtgtagtcgttttgttttagtttggcgtcggtcgcggcgtaatagtagcggagcgcgtaggagtcgtagtagatggtagcgtttagcgtgtcgaagttttttgggtattggaagttttcgtggtagttgttttgtacgtttatttagtcgtggtagtatttttcggattgttgggcgttcgtcgggttttagcgtagttagttaaggagaaggtaaagcgttagtagtgtttttatcgttattgggttttttgggcggtcgggagtaggacgtagttggaaagcgaagggttgagttcgggtttagggcgtatagcgatttcgtttttttagggatacgtcgtaagttgttggtttcggcggtcgaagttagttttgcgtgggatagtaggggtcggggaggcgataggggttgtattacgagtttcgtaggtcgggagttagtatggtgcgcggggcgagttggcgagggtttgcgggaggcgtcggtagaggtagttgttggggttgtcgttgtcgtttttcgttcggtttatagcgtttttcgcgcgaggggcgcgttaatttttcggttatttttttttttattttttaagggagttatagcgttcggggttgttaattttagcgtcgtatagagttttaatttgtggcgatcgtcgggtttcgagaggagtcggaggaaaagaatttgttttttacgtgcgagtattttagataggcggtcgtttagttttagtttttatttgttataggagtaggagttagtttcgtcgcggttaagtataaacggtcgcggggttgttgatagttttgttcgtaaggcgttttttaaaaaggaagagggaggaggagataatgagggttaagaaagagttcgttttttcggatcgcgtttttggagttaattatagcgggtgcggcgcgggtcgagggttttttgcgttttttggttcgcgttttatttttcgttttttttcggttattttcgtttatgtcgtttttttaggatttgatttttaatttgaagatattagatttttttttttttcgtcgtatattttaatttttttatagttcggaaatttttgtagagtgacgttgagggttgtcgaattttcgcgtttatttacgtacgtgggcgcgcgagtggagat

SEQ ID NO: 154 - DNA, 2396 bp, Artificial Sequence
  chemically treated genomic DNA (Homo sapiens)
atttattattttaattattttaggtgtatagattataagtattaattatatttatattgttgtgtaatagatttgtagaaattatttattttgtaaaattgtagttattgaataatagttttttatttttttgttttttgtggtggttttaaatataatgtaatatatattagttgaaaatggaaaaaagaagtatatgaaaatgttaaatgtatagtataaaaaatgaataatagggttattttggttataattttaaatgagaaaatttaaagtaaaataataatttatgatatattatataaaatgtataatttaaaatttttaaaatttaatattaataaaaatatatgtaatatattatataagtatttaataaaattgaatataattatgtttaatttttttaaattgtgaaaaagattttattaatttttgaatatttacgtaaggaaattaagtatatttttttttgaaaaagtttgattttaattttttttttttttttttttttttgagatagagttttgttttattatttaggttggagtatagtggcgtgatattagtttattgtaagtttcgtttttcgggtttacgttatttttttgttttagtttttcgagtagttgggattataggcgttcgttattgtgtttagttaatttttttttgtatttttagtagagacggggttttatcgtggttttgattttttgatttcgtgatttgttcgtttcggttttttaaagtgttaggattataggcgtgagttattacgtttagttagtttgattttaattttaatagataggtgtttttgataattagtttatttttttattgaaattttttttttttttttttaaaaaattttaaatttttaattttcgtttttatttattttttttttgtttttaaaaggaaaggagtgcgtagttttgttgtttgtatatcgtttatagtttttggttcggggtagggttttttaggtcgttcgggggtttatatgtagtttttggggggtcggcgcggggtgaggttcggtcggttggggtcgtcgttaggcgcgttggttgggtagtttttgggagatgaagcgacgtaggcgttttaggtattggttgtagagttcgatgtcgttgtgttcggcgttttttatttatagcggttttatcgttttggggtagcgttcgtagagcgttagttcgtgtgagaagtcgattatttcgttttttatgtcgtggatgatgagtacgggcgacgtgattttggatattttttcgatgttagggaaggcgtcgaagtagtaggttttggtgtcggggaaggcgacgcgtatgttcgaggtgagcggcgagtgtagtattatcgcggtatattcgtagcgcgaggttaggtttacggtgggtatcgtgtcgatgttttgttcgtataggatgatgttgttcgggttgatgtcgtatttggcggcgtcggagtagggttagtcgcggttttcgaggcgcgcgtattttttttattagcgggcgttttcgggtttagtttcggatgcgattttttagtttttttatttagttaagttagtgggttaggtttaggttttatattagtttcgagggttatttttagtttttaatatcgcggcggtgggcgaggttagcggtttcgtttcgttttttggcgttgtcgtttattggcgttttttagtaaggatttgtagggatttcgtttacggagtgtttttggggtaggggtaggggaggttttggcgtttgttttttttttggttatttttaggtgtatattgggaattgtgtgttttttatattttgaatgttttaggtttttttgttcgggttagaaagtcgtttttggtgtattggttaggatagcggatattttttttttttgtagtttttgtttatttttttggttatgaggaatttaggtagttgtgtttttagatgtttttatttaattttggattttcggagtttttacgtttaatgagatgttagtgtaatttaggttagtatcgaaggtggtggttgcggaggtggtatttttttttattagtatttttttttgggagtggataagttttcggttattttagtattattagtttttatttagggttatttttatttttaggttattggtgtgcggtttttgatttagttgatttagtattagttataaggttttttcgtatttagttttaattacgcgggatttatttgttattttgtttatgttaggattttataattttttttttatacgttttaggttttgattttaggtagatatttttttgtaaggtaggagtatgggtaggtgtgcgttttttttgtttggtattcggattttattagtagggttgttttcgt

SEQ ID NO: 155 - DNA, 2396 bp, Artificial Sequence
  chemically treated genomic DNA (Homo sapiens)
acggggatagttttgttggtggagttcgaatgttaggtagaggggacgtatatttgtttatgtttttgttttgtaagagggtgtttgtttgggattagagtttggagcgtgtgggaggagagttgtggggttttggtatgggtagggtggtaggtgggtttcgcgtggttgggattgggtacgaggaggttttgtaattggtgttggattagttgggttaagggtcgtatattaatgatttgggggtgggggtggttttgggtgggagttggtggtgttgaggtggtcgaggatttgtttatttttaagggaaggtgttggtgggagggggtgttattttcgtagttattattttcgatgttgatttgggttgtattggtattttattgggcgtggggatttcgagagtttaaaattgggtggagatatttggggatatagttgtttgaattttttatggttaagggggtgggtaagggttgtaggaaggaagagtgttcgttgttttggttagtgtattaggaacggttttttaattcgggtagggaggtttgaagtatttaggatgtggggggtatatagtttttagtgtgtatttaggggtgattaggaggagaataggcgttagggttttttttatttttgttttaggggtatttcgtaggcgggatttttgtagatttttgttaggaaacgttagtgaacggtagcgttagggaacggggcggggtcgttggtttcgtttatcgtcgcggtgttgggggttgggggtggttttcgggattggtgtggagtttgggtttgatttattgatttggttgagtggggagattagagggtcgtattcggagttgggttcggggacgttcgttggtgggaagggtgcgcgcgtttcggaggtcgcggttgattttgtttcggcgtcgttaggtacggtattagttcggatagtattattttgtacgggtagagtatcggtacggtgtttatcgtggatttggtttcgcgttacgagtgtgtcgcggtggtgttgtattcgtcgtttatttcgggtatgcgcgtcgtttttttcgatattaagatttattgtttcgacgttttttttaatatcgagaaggtgtttaagattacgtcgttcgtgtttattatttacggtatagaggacgaggtgatcgattttttatacgggttggcgttttacgagcgttgttttaaggcggtggagtcgttgtgggtggagggcgtcggatataacgatatcgagttttatagttagtatttggagcgtttgcgtcgttttattttttaggagttgtttagttagcgcgtttagcggcggttttaatcggtcggattttatttcgcgtcggttttttaggggttgtatgtggattttcgggcggtttaggggattttgtttcgagttaggggttgtggacgatgtataggtaatagagttacgtatttttttttttttggaagtaagaagaaaataagtgaaaacggaaattaaagatttaaaattttttaaaaaaagaaaaagaaaattttagtaagaaaataaattggttgttaaaaatatttgtttgttaaaattggaattaaattggttgggcgtggtggtttacgtttgtaattttggtattttgggaggtcgaggcgggtagattacgaggttaagagattaagattacggtgaaatttcgtttttattaaaaatataaaagaaaattagttgggtatagtggcgggcgtttatagttttagttattcgggaggttgaggtaggagaatggcgtgaattcgggaggcggagtttgtagtgagttgatattacgttattgtattttagtttgggtgatagagtaagattttgttttaaaaaaaaaaaaagaaaaaaaaaattggaattaaatttttttaagaagagatgtatttggtttttttgcgtaaatatttaaaagttaataggattttttttatagtttaaaaaaattaaatataattgtatttagttttattgaatatttatgtggtgtattatatatatttttgttaatattaaattttaaaaattttaaattgtgtattttatatgatatattatagattgttgttttattttgagtttttttatttaaagttataattaaagtgattttattatttattttttgtgttatgtatttaatatttttatatattttttttttttatttttagttagtatgtattgtattgtatttaaaattattataagaggtaggaaaatggggagttgttatttaatagttatagttttgtaagatggataatttttgtagatttgttgtatagtaatgtgaatatagttaatatttatgatttgtatatttaaaatgattaagatggtaaat

SEQ ID NO: 156 - DNA, 4660 bp, Artificial Sequence
  chemically treated genomic DNA (Homo sapiens)
gcgcgtttggggtttttttatagggggttttcgtgagttaggtagcgagggtcgttttcgcgttgtagtttagttaggtcgcgtcggtagaggggattttttaatttgtttcggcgcgcggggatttcgtttacgtcgtttcggttttttcggacggggcgtttttttatttttaggtttttcggtggttttcgtattcgggtaaaagtcgggaggatcgggattcgtagcgcgacggtttgtcgggtttttgcgcggtggtatagtttgggttcgtttaagcggggtcgtagggttaaggggtgtttgcgttatttacgttttaggggagttcgtggtggggttggggtcggggtttttaggtcgtcggggcggcgtgggaattttaagtcggggtagttttatttttttagttcgcgttttcggacgttttcgcgcggtaggggtagatgtaaggtatttcggcgtttttttaggcgttttaggagtcggcgttttggtttgtatttttttgcggtttgttgttggatgagtttttggcgagttcggagtttttgtagtaggcgtaattttttttagaaacggaggtttcgggggagttggaggtttcggaagaggtcgtttcgttggaagtattttttagcgaggaagaatatcgggttttgttggaggagttttaggacgcggggttgggacggggtcgggtggttcggggtagggcggtggtttttttttcgcggggaacgtttggttggttacggaggggcgtgttttcgtttcgttttttttatcgggttgatcggtttgggatttttgttttttaggtttaggttcggtgagagattttatatagcggagaattgttatttttttttgggtatttcggggattttagagtcggtttaggtattagtaggtgggtcgtttattgcgtacgcgcgggtttgcgggtagtcgtttgggttgtgggagtagttcgggtagagtttttttgtttttttattagtttatttcgtcgtttgatcgttttttttttatttttatttttcgttttcggaaaacgcgtcgttttttgggttgggtggagattttcgtttcgcgaaatatcgggtttcgcgtagcgttcgggtttgatatcgtttcggcggttcgttttttttgcgttttcgcgttatcgtcgttcgttcgttcgggtttttgtagtcgtttaggtgttagtacggagcgtttggcggcggaacgtagattttaggttcggcgtatatcggggacgttgagcgttttaggcgggagggaaggcgggtagagatggagagaggaacgggagatttagaggggcggaaggatgggcggagggacgttaggagggagggagggaggtagggaggtagggaggtagggaggaacggagggaaagatagagcgacgtagggattgggggcgggcgggagggagtcggggacggggggaggaaggtagggaggaaaagcggttttcggttttcgggagtagcgggattttcgtttttcgggaaaacggttagcgttcggcgcgggttgagggttgggtttatagtcgtcgcgtcggtcggcggggtattatttattcgtttcggtttcggggtttagggagtgggcggtttttttcgggataaaagatcgggattcgggttgtcgtcgggtttttattcgcgcggtttatagatcgtatatttttaggttgagttttgtaacgcggcgcgaggtcgatagtttcggttacggaggagttatacgtaggacgacggaggcgtgattttggttttcgcgtggttttgttttttgtaaggcggtttgttgtttacgttttttcggttttcgaaaggttggttatgtcgattgtttgttttcggagttttgcgggtattcggaaatatgtaggggagggtgtaagttcggtacggtgttttcgttttttttgttaggttttaaatcggttatattgtagattttttacgttgtcgtacgcgggaatttatcgttaggttattacgtcggggaggtattttttttttggggtttcgttttggttttttacgtggaaatgaacgagagttatacgtttgcgtgtgcgagatcgtttcggtaacggcgacgtttataggtattgttttttttacggagagagggtttggtatatttaagatttttacggaggtttagttttatatttttttttatttttttaggttggtttttttttgttgtcgacgcgtgggagtttagagagcggtttttcgttttcgcgggatttttggagaggttcggagagtcggttttcgaaacgcgttttttttttttttttttttttttttttttttttttcgttttttcggttttattattattatcgttattacgtttttttttattattttttttattttatattattattattattattattattattatttcgtcggtcggttttaggtttcgacgttttgggtttttttcggggtggggcgggttgttttaggggggtttatcgttatttatgaaggggtggagtttgtttgttcgtgggtttttataagggcggttggttggttggttggttgttcgggtaggttttttggttgtatttgtcgtagtgtatagttcggttgaggtgtacgggagttcgtcggtttttttttgttcgcgttcgttcgtgaaattgcggtcggggtttatcgcgatggttttttcgatattttcggatagtatttttttcgcggaagttcggggacgaggacggcgacggagattcgtttggatttcgagttaaagcgaggttttgcgagtttgttttgagcggaattcgtattcgggtatcgttattagagaacggttggtttaggttatcggtatttcggagtttagggtttagatttggttttagaatgagaggttacgttagttgaggtagtatcggcgggaatttcggttttggttcgggagacgcggttcgttagaaggtcggcgaaagcggatcgtcgttatcggattttagatcgttttgttttttcgagtttttgagaaggatcgttttttaggtatcgtcgttcgggaggagttggttagagagacgggtttttcggagtttaggatttagatttggttttagaatcgaagggttaggtattcgggatagggtggtagggcgttcgcgtaggtaggcggtttgtgtagcgcggttttcggcgggggttattttgttttttcgtgggtcgttttcgtttatatcggcgcgtggggaacggggtttttcgtattttacgtgttttgcgcgtttggggtttttttatagggggttttcgtgagttaggtagcgagggtcgttttcgcgttgtagtttagttaggtcgcgtcggtagaggggattttttaatttgtttcggcgcgcggggatttcgtttacgtcgtttcggttttttcggacggggcgtttttttatttttaggtttttcggtggttttcgtattcgggtaaaagtcgggaggatcgggattcgtagcgcgacggtttgtcgggtttttgcgcggtggtatagtttgggttcgtttaagcggggtcgtagggttaaggggtgtttgcgttatttacgttttaggggagttcgtggtggggttggggtcggggtttttaggtcgtcggggcggcgtgggaattttaagtcggggtagttttatttttttagttcgcgttttcggacgttttcgcgcggtaggggtagatgtaaggtatttcggcgtttttttaggcgttttaggagtcggcgttttggtttgtatttttttgcggtttgttgttggatgagtttttggcgagttcggagtttttgtagtaggcgtaattttttttagaaacggaggtttcgggggagttggaggtttcggaagaggtcgtttcgttggaagtattttttagcgaggaagaatatcgggttttgttggaggagttttaggacgcggggttgggacggggtcgggtggttcggggtagggcggtggtttttttttcgcggggaacgtttggttggttacggaggggcgtgttttcgtttcgttttttttatcgggttgatcggtttgggatttttgttttttaggtttaggttcggtgagagattttatatagcggagaattgttatttttttttgggtatttcggggattttagagtcggtttaggtattagtaggtgggtcgtttattgcgtacgcgcgggtttgcgggtagtcgtttgggttgtgggagtagttcgggtagagtttttttgtttttttattagtttatttcgtcgtttgatcgttttttttttatttttatttttcgttttcggaaaacgcgtcgttttttgggttgggtggagattttcgtttcgcgaaatatcgggtttcgcgtagcgttcgggtttgatatcgtttcggcggttcgttttttttgcgttttcgcgttatcgtcgttcgttcgttcgggtttttgtagtcgtttaggtgttagtacggagcgtttggcggttaaaagtatatttttgtttgtttttgttcgttttttggttagatttgcgcgtagtgcgtatttcgggtgacgtgtaagggagttcgttggtttttttgtgtttttgttcgttcg

SEQ ID NO: 157 - DNA, 4660 bp, Artificial Sequence
  chemically treated genomic DNA (Homo sapiens)
cggacgaataagggtatagagaggttagcgagtttttttgtacgttattcggggtgcgtattgcgcgtaggtttagttaggaagcgggtaaagatagatagaggtatgtttttgatcgttaggcgtttcgtgttggtatttgggcggttgtaggggttcgggcgggcgggcgacggtggcgcgggggcgtagaggaggcgagtcgtcggagcggtgttaggttcggacgttgcgcggggttcggtgtttcgcgggacgggggtttttatttagtttaggggacgacgcgtttttcgggggcggggggtgggggtggggagggggcggttaggcggcggggtgggttggtggagaggtaggagagttttgttcgggttgtttttatagtttaggcggttgttcgtaaattcgcgcgtgcgtagtaggcggtttatttgttggtatttgggtcggttttgggattttcgggatgtttaggaaagaatggtagtttttcgttgtgtggagttttttatcgggtttaggtttagaaggtaggaattttaggtcggttagttcggtggagggggcggggcggagatacgttttttcgtagttagttaggcgtttttcgcgaaagagaggttatcgttttgtttcgaattattcgatttcgttttaatttcgcgttttaaagtttttttagtagagttcggtattttttttcgttgaggggtgtttttagcgaggcggtttttttcgaggtttttagttttttcggggttttcgtttttaggagaggttgcgtttgttgtagaaatttcgggttcgttaggagtttatttagtagtaggtcgtaggggagtgtagattagggcgtcggtttttggagcgtttgggagggcgtcgggatgttttgtatttgtttttgtcgcgcggaggcgttcgggggcgcgggttggggaggtggagttgtttcggtttggggtttttacgtcgtttcggcgatttggggatttcggttttagttttattacggatttttttgggacgtgggtggcgtaagtattttttggttttgcggtttcgtttgagcgggtttaggttgtgttatcgcgtaggggttcggtaggtcgtcgcgttgcgggtttcggttttttcggtttttgttcgggtgcggaggttatcgaggagtttgagggtgggagagcgtttcgttcggaggagtcggggcggcgtaggcgaaattttcgcgcgtcggggtaggttgggagattttttttgtcggcgcggtttggttgggttgtagcgcgggggcggttttcgttgtttggtttacgaaagttttttgtgggagagttttaggcgcgtagggtacgtggggtgcgggaagtttcgttttttacgcgtcggtgtgggcgaaggcgatttacgagggagtagggtgattttcgtcgggggtcgcgttgtataggtcgtttgtttgcgcgggcgttttgttattttgtttcgggtgtttggtttttcgattttgaaattagatttgaattttggatttcgggaggttcgtttttttggttagtttttttcgggcggcgatgtttggaaagcgattttttttaaaggttcggaggagtagggcggtttgggattcggtgacggcggttcgttttcgtcggttttttggcgggtcgcgtttttcgggttagggtcgagattttcgtcggtgttgttttagttggcgtgattttttattttgaaattaaatttggattttgggtttcggaatgtcgatggtttgggttagtcgttttttggtggcgatgttcgggtacgggtttcgtttaaagtaggttcgtagggtttcgttttggttcggggtttaaacgagttttcgtcgtcgttttcgttttcgggttttcgcggggagggtgttgttcgaaggtgtcgggagggttatcgcggtgagtttcggtcgtaattttacggacggacgcgggtagagagaggtcggcgggttttcgtgtattttagtcggattgtgtattgcggtaggtgtagttaggaggtttgttcggatagttagttagttagttagtcgtttttgtaaaggtttacgggtaggtaggttttatttttttatgaatggcggtgagtttttttgggatagttcgttttatttcggaagggatttagggcgtcgaggtttggggtcggtcggcggggtggtggtggtggtggtggtggtggtggtgtggggtggggggggtggtgggggagggcgtggtggcggtggtggtggtggggtcggagagacgaagaggaagggggagaggggggaggggggaggggggcgcgtttcgggggtcggtttttcggatttttttagggatttcgcgggaacgggaagtcgttttttgggtttttacgcgtcggtagtagggagaaattagtttgggagggtggaggggagtgtggaattgaattttcgtgggagttttgagtgtgttaggtttttttttcgtgaaggaggtaatgtttgtgggcgtcgtcgttgtcgggacggtttcgtatacgtaggcgtgtggttttcgtttatttttacgtagaagattagagcgagattttagagaggagatgttttttcggcgtgatggtttgacgatggattttcgcgtgcggtaacgtggggagtttgtagtgtggtcggtttggaatttggtaaggagagcgaaggtatcgtgtcgggtttgtatttttttttgtatgttttcgggtgttcgtagagtttcgggagtaaatagtcggtatggttagtttttcgggggtcggagagacgtgagtaataggtcgttttgtagagggtaaagttacgcggaaattaaaattacgttttcgtcgttttgcgtgtggttttttcgtggtcggggttgtcggtttcgcgtcgcgttgtagggtttagtttggggatgtgcggtttgtgaatcgcgcgggtgaaaattcgacggtaattcgagtttcggttttttgtttcggaggaaatcgtttattttttgggtttcggaatcggggcgaatgggtggtgtttcgtcggtcggcgcggcggttgtgggtttagtttttagttcgcgtcggacgttgatcgttttttcggagggcgggggtttcgttattttcggaggtcgaagatcgttttttttttttgttttttttttttcgttttcggttttttttcgttcgtttttagtttttgcgtcgttttgttttttttttcgtttttttttgtttttttgtttttttgttttttttttttttttttaacgttttttcgtttattttttcgtttttttaggtttttcgtttttttttttatttttgttcgttttttttttcgtttggaacgtttagcgttttcggtgtgcgtcgggtttggggtttgcgtttcgtcgttaggcgtttcgtgttggtatttgggcggttgtaggggttcgggcgggcgggcgacggtggcgcgggggcgtagaggaggcgagtcgtcggagcggtgttaggttcggacgttgcgcggggttcggtgtttcgcgggacgggggtttttatttagtttaggggacgacgcgtttttcgggggcggggggtgggggtggggagggggcggttaggcggcggggtgggttggtggagaggtaggagagttttgttcgggttgtttttatagtttaggcggttgttcgtaaattcgcgcgtgcgtagtaggcggtttatttgttggtatttgggtcggttttgggattttcgggatgtttaggaaagaatggtagtttttcgttgtgtggagttttttatcgggtttaggtttagaaggtaggaattttaggtcggttagttcggtggagggggcggggcggagatacgttttttcgtagttagttaggcgtttttcgcgaaagagaggttatcgttttgtttcgaattattcgatttcgttttaatttcgcgttttaaagtttttttagtagagttcggtattttttttcgttgaggggtgtttttagcgaggcggtttttttcgaggtttttagttttttcggggttttcgtttttaggagaggttgcgtttgttgtagaaatttcgggttcgttaggagtttatttagtagtaggtcgtaggggagtgtagattagggcgtcggtttttggagcgtttgggagggcgtcgggatgttttgtatttgtttttgtcgcgcggaggcgttcgggggcgcgggttggggaggtggagttgtttcggtttggggtttttacgtcgtttcggcgatttggggatttcggttttagttttattacggatttttttgggacgtgggtggcgtaagtattttttggttttgcggtttcgtttgagcgggtttaggttgtgttatcgcgtaggggttcggtaggtcgtcgcgttgcgggtttcggttttttcggtttttgttcgggtgcggaggttatcgaggagtttgagggtgggagagcgtttcgttcggaggagtcggggcggcgtaggcgaaattttcgcgcgtcggggtaggttgggagattttttttgtcggcgcggtttggttgggttgtagcgcgggggcggttttcgttgtttggtttacgaaagttttttgtgggagagttttaggcgcgt

SEQ ID NO: 158 - DNA, 2427 bp, Artificial Sequence
  chemically treated genomic DNA (Homo sapiens)
ttttttggggtttgggtggggagttttttttagtaataaatatgagagggatagagaatgttagagagttttttgttgggattgggatggttggagggtattatagtattggtttcgaatattgaacggagaattgttatgtaataagaatttgggtatattagatttttgtaggtattttcgggatttatagatcgtatattcgatgggcgttcgtaggacgtgaatggtatttcggtaacgttaagttttattttagagttatagggtgttttttattaggttacggagttttttgggttatattgtttagggatattttgtaggggaggaaattgttttttttttttttttatgatttttgtatgaattttaattaagaaatattatatttagaattatagtatttatagtgatagtttttagaagattgtaatagtttttttgttatttaaggggtatagacggtgtagttgtttatttgaatgattttttaaatgagtgattattattattttaatttttttagttgtagttttgttataggttattgattataagtgttggtaaagaaattgtttttttaagtattttggcgttttttggagtgacggttatttttagtagttaaattgtattatatttttattttaattttgtgattgttttagtatttttaaaaatataaatcgattttttaggaaaaaataaaaaaacgaaaaaattttttattttttttaaatttttggtttaggtttatttgattttttgtaagttgttttttagggtaggttttagttttatttgttgcgtttgtttttttattttattttagttgagtaggtagagtttgtttttggaaacggttcggttatttgggagggaataaataggtattgtttagattcggagttgtaggtagggtttagtaggattttaggcgggtatataggggtttatttggagggatttgaggggtataggttatagtcgggagagtttcgggtaggtatataggggtttatttggagggatttgaggggtataggttatagttaggagagtatagataagaggttttcgaggttattagggtcgatttttattttattttaaggattagggacgtaaaaggattttaataaagacggttatattatttgttgtagaatgagtataaatgttttttttagttttcgaggtcggtattggtttcgttgatttttttaattttgttatttgtgtagtaggcggtaatagggataggtagacgatatagttggggttagaggacgacgtagagagatttatattagagattttcggggagtgatagagttttcgttttaattttagtgagtgggataggttgagtggggattgagtacgtttagggttagagtgggagggttagtcgtgtcggtttttaaagaggatttcgggaaataaatatttttttattcggtaaggataaattaagtaattgtcgagataggtgttcgcgttttaatttaaggttgtttagatagataagcgtttatcgtcgtattgttttaatagttgttgagatatatttttgtagtcgttttagttagagttagggaggttttgggagaatggttttgtttgtttttagtttttttttatttttaggagtttttttttttttttattttaattgatattttcgggttttttatttgtttagagtttgtttagtggggtatttaacggtggataggtgagagaggtgaggggttgggttgttatcgcggttaagggagttatggttttttagtttgaacggtttttgttcgaaattaggatataaatatagtattatatatagtagaaatagtttagaaaggttttagtttagatggtattggaataaatagttttttttaagttattttaaaatgaaagttttgggttatttatttttaaagaggattttaggatagttttaggagtttttttatgatatattttatggagaatgtttggttgttgcgtttatttaatgtagttattgaatagaaatttaagagcgttgttttgttagtttgaaattttttttatgtttttagttattagggttttagttaggttagaaataatagaggtagtaggtttttttagaatagtagtgtgaggttttttatagattttttttagtaatattattgttagtggtgaatattataaatagtatttatttaaagtttttaacgtgttttagggatatacggcgaatggagaaacgtttatttaagaaaattatttaagtggtagtaggaatagtaatttcgtgatatttgggttataatttgtttttttatttttatgtgataaaagttttatttttagtaggtaatcgagaagataggtttttttttttttagtgttattgtagtagtggcgggt

SEQ ID NO: 159 - DNA, 2427 bp, Artificial Sequence
  chemically treated genomic DNA (Homo sapiens)
gttcgttattgttgtagtggtattgggggagagggagtttgttttttcggttgtttgttgggagtagagtttttgttatatggggatggggaagtaggttgtggtttaagtgttacgaagttgttgtttttgttgttatttaggtggtttttttggataagcgtttttttattcgtcgtgtgtttttaagatacgttagggattttaagtgggtgttgtttgtaatgtttattattggtagtgatgttgttggagagggtttgtggagagttttatattgttgttttggaagagtttattgtttttgttgtttttgatttggttgaaattttgatggttggaagtatgaagaaggttttaggttggtagagtaacgtttttgagtttttgtttaatggttatattgagtaaacgtagtagttaagtattttttatggggtgtgttatggaggaatttttggaattgttttgaagttttttttagaagtaggtagtttaaaatttttattttaaagtgatttggggaaaattgtttattttagtgttatttgggttggggtttttttgggttgtttttgttgtgtatgatgttgtgtttgtgttttgatttcgggtagaagtcgtttaggttggagggttatggtttttttggtcgcggtgatagtttagttttttattttttttatttgtttatcgttgggtgttttattgagtagattttgagtaaatgaggggttcggagatgttagttagggtaaaggggggaaaaggtttttgaagatgagaggaggttgagagtaggtaaggttatttttttagggtttttttggttttagttgaggcggttgtaggaatgtgttttagtagttgttagggtagtgcggcggtgagcgtttgtttgtttgggtagttttgggttgggacgcggatatttgtttcggtagttgtttgatttgtttttgtcgagtgggagggtgtttgtttttcggggttttttttggaagtcggtacggttggtttttttattttggttttagacgtgtttagtttttatttagtttgttttatttattggggttggggcgggggttttgttatttttcgagggtttttgatgtgggtttttttgcgtcgttttttggttttagttgtgtcgtttgtttgtttttgttgtcgtttgttgtataggtggtaggattagaggggttagcgaggttagtgtcggtttcgaaggttaagaagggtatttatatttattttgtagtaggtggtgtggtcgtttttgttaaaatttttttgcgtttttgatttttaggataaagtaaaagtcggttttggtggtttcgggggttttttgtttgtgtttttttgattgtagtttgtgttttttaggtttttttagatgagtttttgtgtgtttgttcggggttttttcgattgtagtttgtgttttttaggtttttttagatgagtttttgtgtgttcgtttggggttttgttgagttttgtttgtagtttcgggtttgggtagtgtttgtttgtttttttttaggtggtcgggtcgtttttaaggataggttttgtttgtttagttggagtggggtggagaagtagacgtagtaggtagggttgggatttgttttgaagggtagtttgtaggaggttaggtgagtttggattagggatttgaaggaagtgagaagttttttcgtttttttgtttttttttggagagtcgatttgtatttttaaaaatattgaaatagttatagagttaaagtgggagtatgatatagtttagttgttgggaatggtcgttattttagggagcgttaaagtgtttaaaagaatagtttttttgttaatatttgtggttagtaatttgtaatagagttataattaggaaaattagagtggtggtagttatttatttaagaagttatttaggtaagtagttgtatcgtttgtattttttaagtagtaaagaagttgttatagttttttgaaaattattattgtgagtgttataattttgaatgtaatgttttttaattagaatttatataagaattatgaaaaaaaaaaaagagtaatttttttttttgtagaatgtttttgagtagtgtggtttaggaggtttcgtagtttggtgaaaggtattttgtggttttggggtggagtttggcgttatcgagatgttatttacgttttgcgagcgtttatcgagtgtgcgatttgtgggtttcgagggtgtttgtaggggtttgatgtgtttaggtttttgttgtatggtagtttttcgtttagtgttcgaaattagtgttgtgatgttttttagttattttagttttaataggaagttttttggtattttttgttttttttatgtttattattggaaagggttttttatttagattttaggaaa

SEQ ID NO: 160 - DNA, 2350 bp, Artificial Sequence
  chemically treated genomic DNA (Homo sapiens)
tagatgtattggtgagattaggttttggttgtgattttgggtttgtattatgattttcgatttttgatttagattataattatgatttggtcgtaattttttgatttggattttagttttttagtttttagagtttgtgatttttgattttgatttggattataatttttgattttgaatgtgatttttgagatttaatttgatagtaatatttgattttaattattatttttgatgatagtttttgtttatattttgatagtaattgtgatttttatgattttggttttgaatgtgatttataatttttgaatttgattgtgatatttgattttaattataattattaattatagtattgattataattttgattgtgtgatttttggttttattttttttatagtttttgtttttttttagaattttttttttggaatttggttgggtttataatttttgattttggtttttgatttgaggtagaattttggattttgattataatttttgattttaattggatttagattttagttattaattttgatttatggtttagtcgaattttatttaatgattttagtttataatatttgattggttttttgttttagttgatttttgatttttgtttgattttttttttgattttaaaattttggtataggtagtttttagaaatttagatttataggatttgtaattatggttttcggaattcgagaattttggttagttttatttatttttgttatagagtttttttttagtttttaatttatgagattttttattattttttttagatattttattttaaggggattggtcgggtgtgtttcgagattggattttttttgaatatttttattttttatagatgtggacgaatgtagttcgggtgtttttttttgtggtttttacggttattgtattaatatcgaaggtttttttcgttgtagttgcgcgttaggttatcgggcgtcgtcgggtcggttcgggttttgcgtaggtgagtagtatagggattcgttagagagtttgggagtagggtttgggttttagggtaaagtcggttggaaaggtggaggcgggattaaggcgttgtgggaggagtttagaaatttggtattggtgggggcggggttattgcgatgtgggcggagtttgtttgggaggtcgggtttcgtgatttcgtttaatttttcgcgtattttagacgtgaacgagtgtttggagggcgatttttgttttttttacggcgagtgttttaatattgacggtttttttgtttgtatttgtgtttttggttatcgattcggatttcgcggagttttttgtttcggttcgtattcgggttgattttggtttcggaaagggtgggtttagggtaggaaaaggcgggacggggagaagagggcgaaaaggggaaaacgagtttttagtcggggtattttagtaggattagggggtagttggtgggagtttcgaggtagtgagggggggcggggcgtggagatgaaagggtcgagtttgggtatttggatcgtgattgtaaagaagttgttttaaattcgtcggggggcggtgtttgtagggagggaagtagcgtgaggtaggttggggaaggcgtgagaggtttaggagagtcgaggggcggtggaggggtgtggtttagaatgttaggcggagcgggaggtgggtcgggttttcggacgttttgtttcgtagacgttgacgagtgtagcgaggaggatttttgttagagcggtatttgtattaatatcgacggttttttcgagtgtatttgtttttcgggatatcgcgttggttcggatttcgttttttgtttcggtgagaggtttcgtttcggtttgatttttttttttttcgatttttcgattcgtcgattggttttttatttttgttttttttttttcgttttttttttttttttatttttttttttcgtttttttttttagtttttttaatttttttttattttaatttttttttgtttttttttttgttttttcggttttttttttttgattttttttttttttttttgtattttttattttgtttttttgttttttatattcgattattcgatttttttttttagacgtggacgaatgtcgcgagcgaggtttagttttgtgcgggtcgtagcgttgtgagaattttttcggtttttatcgttgtgttcgggattgcgattttgggtattacgcgggtttcgagggtatttgtgacggtgagtttgtttttattcgttttcgttagcgtttgtaacgcggtgttggaggttgtttttttggggattgaggaggggcgttttg

SEQ ID NO: 161 - DNA, 2350 bp, Artificial Sequence
  chemically treated genomic DNA (Homo sapiens)
tagggcgtttttttttagtttttaagggagtagtttttagtatcgcgttgtaagcgttagcgaaggcgggtgggggtaggtttatcgttataggtgttttcggggttcgcgtggtatttaggatcgtagtttcggatatagcggtaggagtcgggagagtttttatagcgttgcgattcgtatagggttgggtttcgttcgcgatattcgtttacgtttgaggagagaggtcgggtggtcggatgtgggaagtagggaggtaagatgggggatataaagaggggagaggagagttagaagggggaggtcggggaagtagaggagagggtaggagaagattggggtagaggagagttggggaggttaggagaggaggcgggggaaagaggtaaggggaggggagaagcggaggaggaaagatagaggtgggaggttaatcggcgagtcggggagtcgaagggaggagggattaggtcggggcggggttttttatcgaggtaggaggcgaggttcgggttagcgcggtgtttcggaggatagatgtattcgaaggagtcgtcggtgttggtatagatgtcgttttggtaaaggtttttttcgttgtattcgttaacgtttgcgggatagggcgttcgaaggttcggtttatttttcgtttcgtttaatattttaggttatatttttttatcgtttttcggtttttttaggttttttacgttttttttaatttgttttacgttatttttttttttgtaaatatcgtttttcgacgggtttagaatagtttttttataattacggtttaaatatttagattcggtttttttatttttacgtttcgtttttttttattgtttcgagatttttattagttgttttttgattttgttggaatatttcggttaaaaattcgttttttttttttcgttttttttttttcgtttcgtttttttttgttttaagtttatttttttcggggttaggattagttcgggtacgaatcgaggtaagaggtttcgcggggttcgggtcggtagttaggggtataagtataggtaaaggagtcgttagtgttgaggtattcgtcgtgagggaagtagaaatcgttttttaggtattcgtttacgtttagggtacgcgggagattgggcggagttacgggattcggttttttagataagtttcgtttatatcgtagtaatttcgtttttattaatgttaggtttttaagttttttttatagcgttttggtttcgtttttatttttttagtcggttttgttttggaatttaggttttatttttagattttttggcgggtttttatgttgtttatttgcgtagggttcgggtcgattcgacggcgttcggtagtttggcgcgtagttgtagcggaaggagttttcggtgttagtgtagtggtcgtggggattatagggaggggtattcgaattgtattcgtttatatttgtggggggtgggggtgtttagaaagggtttagtttcgggatatattcgattaatttttttggagtagggtgtttgggggaggtggtgggaagttttatgagttggaggttgggggagggttttatggtagaggtgggtagggttgattaaggttttcgggtttcggggattatggttgtaagttttgtgggtttaggtttttaggaattatttgtgttaggattttggagttaggagagggattagatagggattagaaattaattagggtaagggattagttaagtattataaattaggattattggatgggattcggttgagttatgggttagagttagtgattggaatttgaatttagttaggattagaagttatagttagggtttagaattttgttttaagttaggggttagggttagggattatgaatttaattaggttttagagaagggattttgagaagaggtaggggttgtgaaagagataggattaagagttatatagttaaggttatggttagtgttatggttagtggttatgattagggttaaatgttatagttaaatttaggagttataggttatatttagggttagagttatgagggttataattgttattagggtatgggtagggattattattaagggtgatggttagggttaaatgttattgttaagttgggttttaggagttatatttagggttaagagttgtggtttaggttagggttaggagttataggttttggggattgagggattgaggtttaggttaggaggttacggttaggttatagttgtgatttgggttaagggtcgggggttatgatgtaggtttaaggttatagttagggtttggttttattagtgtatttg

SEQ ID NO: 162 - DNA, 2475 bp, Artificial Sequence
  chemically treated genomic DNA (Homo sapiens)
gttataaaaaggttaatagataagtattttttaagtaataaagttttttttattatatgttataggagttattgagtgtttttgtaaagaaaattagtattataaagtagtaaattataagtgatgtaaatattattttttgtagaaatttataggaagggaagttaggtagaggtatgtttttatgttagtaggtggggatataaattttttttttgttatttttttagaagaaagttagtaatagagattaagagcgtaaaaaaaaaagaaaagaaaaaagaaaaaaaaaattatttcgatttaataattttatttttaagaatgtatttttaggaaaaaaaattagatatttgtttaaggatttttgttgaattttttttataaggttattatattattaaatagaaataattgaaatagttaagttgggttatattatgggatatgtttatgatggtattatatttaagtgacgtttttgaagtacggtagtgatttttggaaaaggtttaatatattattttaatgagacgtgtaaatttattattacgatatattaggagaaatgttttgatagacgaagtgggaataattgggagagtgaatgatggagtgttaggaataggggtatatgagttgggttttttaggttgtggaggtgttttcgggtggaagagaaggagggattaagcggagagttttaagttttgaagataattgggaaggtaatatattttttaagaagggtatgtagtagttatattttttattcgttacggttagtaaatttattgtgttttttggagtgagttgggttattaagatgggtggtgtttttttgttggggaagaggggttcggtgggaatttttgttttaaggtttggtagtaacgtttttacgttgttttgggtcgtaggtttgttaagtttttcgttttcgtttttttgcgcgcgaaataagttttagggttaatgtggtttttttatttagtgttttcgggggcgttaaaaaacgatttgtttagatttttagcgtcgacgttgcgtataagcgtagttaattgttggattcggtcggtgtgaagttttatatttaaaaggatgaagggtatttatttggtttaagagaacgatttttaggtaaagggttagatttaggtgaggagtcggtatagggttagaggtgttttgtatatttagagttttttttttgagttttttgttttgttcggtttttttgggtcgtaggcgtttattttgttttttggggtttcgttgttttttttttgttaggttttttttatagtaacgtttttttttttttttttttagtttttgagtttttttttttttttttttattgttttatttttgagggatagaagtggggtggtttgagagtaggagattggagggaagaagtaagtttaggtttagttgtaagtattttttattttcgttttcgttttcgttttcgttttcgttaggttttaggatatttgatttttgttaggttttatacggtttggtttgaagtgttttttttttaatagttgtggatcggcgaggtttaatggtttacgtttgtaattttaggattttgggaggtcgaggtgggtggattatttgaggttaggagtttaagaatagtttgattaatatggtgaaattttgtttttattaaaaatatagaaaattagtcgggcgtggtggcgtgtatttgtaattttagttattcgggaggttgaggtaggaaaatcgtttgtatttaggaggtggaggttgtagtgagtcgagatcgcgttattatattttagtttgggtaataagagtaaaaaatttcgttaaaaaaaaaaaaaagaagaagaagttgtggagttgtttgatttttgattttgttcgtttaggttggggtcgttttggttttttaaatttagtagtgagtttggatagatttagaggtgtttattttaggtaataggagttttagataaaattaggttttttttttggtttagatttttttttgtttataatatttttaggatgtgggatatttagaggtttgtgtagttggaggatgttgggaaatgtgaggagaagatgttttttttttaaaattggaatttttttgattatttgaatttttttgttagttataaattttatttatttttattttatttttgtttttttgttatcgtttatttgtttaatttttgaaggtagtgagttttttgttattggaagtgtatttttcggtatttttatttgtagaagtttttatagatgttgttttttttttggtttagattatgtttattgtgaaggaagtagtatatcggttgtttaaaagtgagatgagtttttatgtagtgttggattttaagaagggcgttttatttgaagattttaaaaaattttataggtttagattttagttttttattgatttttggaatttttttttta

SEQ ID NO: 163 - DNA, 2475 bp, Artificial Sequence
  chemically treated genomic DNA (Homo sapiens)
taagggggaaattttaaggattaataaagggttgaggtttgaatttgtaggattttttgaagtttttaggtgaggcgttttttttaagatttagtattgtatagaggtttattttatttttggatagtcggtgtgttgttttttttatagtagatatgatttgagttagaggagaagtagtatttgtgagaatttttataagtaagggtatcgagaagtgtatttttagtgataggaaatttattatttttagggattaggtaggtaaacgatgatagaaggataaggataagataagagtgagtgggatttgtggttagtaggagaatttaggtgattagaaagattttaattttaaggaggaaatattttttttttatattttttagtattttttagttatatagatttttagatattttatattttagaggtgttgtaagtagggagaggtttaagttaggaaaagagtttgattttgtttagagtttttattatttggagtaaatatttttgggtttgtttaagtttattgttgggtttgaaagattagggcggttttagtttgaacggataggattaggaattagatagttttataattttttttttttttttttttttttgacggagttttttgtttttgttgtttaggttgaagtgtaatggcgcgatttcggtttattgtaatttttattttttgggtgtaagcgatttttttgttttagtttttcgagtagttgagattataggtgtacgttattacgttcggttaattttttgtgtttttagtagagatagagttttattatgttggttaggttgtttttgaatttttgattttaggtgatttatttatttcggttttttaaagttttgagattataggcgtgagttattgagtttcgtcgatttatagttattaagagagaaatattttagattaaatcgtgtgaggtttaatagaagttaagtgttttagagtttggcgggggcgggggcgggggcgggggcgggggtggggagtgtttgtagttaggtttggatttgttttttttttttagttttttgtttttaaattattttatttttgttttttagaggtgggatagtggggagaggaggaagaggatttagaggttggagaaggaagagaaaaggcgttgttgtgggaaagatttggtaaggaaaaggtagcggaattttagagagtagggtagacgtttgcggtttaggagaatcgagtaaggtaaggagtttaaagggagagttttgagtgtgtagggtatttttggttttgtgtcgattttttatttgggtttggttttttatttgggagtcgtttttttaagttaggtgggtgttttttatttttttgggtgtgaaattttatatcggtcgggtttagtagttgattgcgtttgtgcgtagcgtcgacgttgagggtttgggtaggtcgttttttggcgttttcggaagtattgggtggggaggttatattggttttgggatttatttcgcgcgtagggaagcgagagcggagggtttagtaggtttgcggtttaaggtagcgtaggagcgttgttgttaggttttggggtagggatttttatcgagttttttttttttagtaggagggtattatttattttgatggtttaatttattttaggaaatataatgggtttgttgatcgtggcggatgagaggtatggttgttgtatgttttttttaagaggtgtgttatttttttagttgtttttaggatttagggtttttcgtttggttttttttttttttttattcggaaatatttttataatttggaagatttaatttatatgtttttgtttttgatattttattatttatttttttagttgtttttatttcgtttgttaaagtattttttttagtatatcgtaatgatgagtttgtacgttttattaaaatgatgtattgagttttttttaaaagttattatcgtgttttaaaaacgttatttaaatatgatgttattatgagtatgttttataatgtaatttaatttggttgttttagttgtttttatttgataatataataattttataaggaaaatttaatagaaatttttgaataaatgtttaatttttttttttaaggatatatttttagaagtggaattattgggtcgaaatgatttttttttttttttttttttttttttttttttacgtttttgatttttattgttaatttttttttggaaaggtagtagaaggaggatttgtatttttatttgttggtatgggagtatgtttttatttggtttttttttttgtgagtttttataggaggtagtgtttgtattatttataatttattattttgtagtgttggttttttttgtaagagtatttaatggtttttgtaatatgtagtagaaaaagttttgttatttggaaaatgtttatttgttaatttttttgtagt

SEQ ID NO: 164 - DNA, 3190 bp, Artificial Sequence
  chemically treated genomic DNA (Homo sapiens)
gggttggcgggtattgagttggggttattacgtttttttagagcgtttgcggaggtggcgaaggtttggagagtatacgaggcggaattcggatcgagtgagttttttgagtcgtttgcgtgggacgtagggagagggcgaataacgtttttaggcgttgaatgtaggggtaaggagttagcgagggtggttggagtaggttttgttagttgttattaagtttttttataggtttgggggtttggggttttttggaaagattttttcgtcgcgttgattagtacggggttcgttttcgtattttgaaggttgtcgcggtttttcgttatttataattaagtttaagattaaggttgtaagttgaggtcggggtattgataacgggaatgaagttataggggaagaggataattgggacgggttggatttatatttgatattcgggaaatttttagagcgtgtggtgtttttgttagcggtagttattggtggagttgaggttatcgttattgtcgtcgttggcgttttgtttttggaattttttagtaagatggtatttattgtttgttttttttcgattagtatttttagtcgcgttttttttttttcgggatacgtattagttatatattgtggggagaagatgggttatgtaaatgtaagttaacgcgtttttttagttatttttgtataatgtaataggaatagcgattcgcgcgtacgaatcgggtagtgtgcgcgtgtgtgtgttcgcgtgtgtgagcgcgtgtgttagcgtgcgttttcgcgcgggcgtgcgtttgggtggatttttgcgtggtttgggaggtaaatcgggcgtttttttaagtcgttttaatatgatttaggtttttaaatacgtgaaagcggtagatataatagggatgcgaaggaaataaaaaataattggggaagtggtgttaagttatttaggttttgaattgaggacgagtagtgcggtcgcgtttggggcgcgttcggaaattatttttagtttgtggcggttattgttttatttaaatttttttgcggggagagttgagcggatttttggggggttggttttgggttagttttaaatttttcggttgtatttcgcgtggttttatcgacggcgcgtttcggcgtagtttttggcgcgggttcgtttttttttttttgtttagatttagttttatcggatttgttataatatgatagtaatttattggaggtaggaagagtagtacgaaataagatgagaaaattaaaaatatttttttttttttaaatagagacgtgtatttagttttttttatttgtttgtttgttttttatattattttttaatttttggaaagagattgcgaagtggaaacgttgtttgtatagaaattaggttttttagttgttaagattgttttttaatttttaggttgaatttttttttgttcgttgtaatttatggggaaatttaataacgtttttgttagaagtagttaggttgaaggaagaaagtgggggtgtttaaattaattttattaaattttggattatttttttagttaaagttatttaaggtggtttaggatgagggaattagtgatggggtgaggagtggggggtatattattaaggttgtttgtatttgaaataacgttattttggttgagaggtttgttgtattttattttttaattttatatttcgattattttttagtgtttaagtaatagatttttttttttggtagtatattattaagtaggtatggggaattttttttttagggtttagatggtgatattatttttaaggattggtggtaggaacggtatgtgtcgggtagatagagagaaggttagggtggtatttgtcgggttagttaggcgttttttaattttttttagagaggatagggttaaaagttaagtttgattttgttttttggaaattattgggtagtagtcgcgttttttaagtattttttaaattagaaaagtaggagggatttcgggagagagggagggaatgagggagggagagaaagagggttttaggagcggagcgcgttagagcgcgagggacggagggagaggaggagcgcgggagttgcggaggcgatttcgcgaatttattattgtaaatatattcgggggtgttaggaggggtaggggtgggggtcgcggcgtttatattagttcggtcgcgtcggattgaggtagtagtgtggtttgagtagtttttagatttacgtcgggcgggcgtagtatttggagcgagttttgcgttcgttttcgcgtagcgtcgtacgttcggtttcgagttgttcgtatatacgcgtcggaggagagttcgtttagttttttcgtcgagtttcgggattttttaaattcgaggagtttcggcgtcgcggggtagttttttgtcgtttttttcgttcgttgtattttttttggggttcgttggtttggcgaagcggagagggggaggcggaggaggagagaaggcgggggtcgcggcggtcgaagttaagagaaagtggtatgttcgaattttggaggcggtggtggcggaggacgggggaagacgatgtcgtagtttcgtaggggacgtaggcgagagtaagcgaggcgagttgggcgtttcggtttcggttcgttgcggggaggcgcgcgtcgttttgaggtttcggttttcgtattttcgcgtttcgacgttgcgggcgatagggtttggttttagtagtcgtcgtcgtcgtcgtcgtcgttattcggaggatttagtaaaagtttggatttgggggagggcgcggcgttgagcgggattattattagggttggaaggagatttcgagaatttttgtaggtaacgcgcgtttttaattttttttttttatgtttcgtcgttgcgttttcgtttttttttagagttttttttggttttcgcgggtttggtagaaagtaagagggaggcgaagtttaagatttcggggatgagtatcgagcgttggtagattattagttacgttagaggggtagttgtgttgagaggtaaatttttttaggagtgggtgagaatttttagttttagttggtgttttattttgtagttttttggaaatttggaacgtgaatttaggggtttttagtattttttagtttagagaaatggtttatggattttattt

SEQ ID NO: 165 - DNA, 3190 bp, Artificial Sequence
  chemically treated genomic DNA (Homo sapiens)
aagtgaaatttatgaattatttttttggattgaagaatattaaaagtttttggatttacgttttaaatttttaaagagttataagatgaggtattagttggggttgagggtttttatttatttttgggggaatttgttttttagtatagttgtttttttaacgtgattagtgatttgttagcgttcggtgtttattttcgggattttgaatttcgttttttttttattttttgttagattcgcgagggttaggaagggttttgggaggaagcgggagcgtagcggcggggtatggaagaagagggttgggggcgcgcgttatttgtaaaggttttcgaggtttttttttagttttggtggtaatttcgtttagcgtcgcgtttttttttagatttaaatttttgttgggtttttcgggtggcggcggcggcgacggcggcggttgttggagttaagttttgtcgttcgtagcgtcggggcgcgggggtgcggaggtcggagttttagagcggcgcgcgttttttcgtagcgggtcggggtcggggcgtttagttcgtttcgtttgttttcgtttacgttttttacggagttgcggtatcgttttttttcgtttttcgttattatcgtttttagggttcgggtatgttatttttttttggtttcggtcgtcgcgattttcgtttttttttttttttcgttttttttttttcgtttcgttaagttaacgaattttaaaagaagtatagcgagcggggaaggcggtagaaagttgtttcgcggcgtcggagtttttcggatttggaggatttcgggattcggcgggagagttaggcgggttttttttcgacgcgtgtgtgcggatagttcggagtcgggcgtgcggcgttgcgcgggggcgggcgtagggttcgttttaagtgttgcgttcgttcggcgtgggtttggaggttgtttagattatattattgttttaattcgacgcggtcgggttaatgtaggcgtcgcggtttttatttttattttttttgatattttcggatatgtttatagtaatgaattcgcgggatcgttttcgtagttttcgcgtttttttttttttttcgtttttcgcgttttggcgcgtttcgtttttggagtttttttttttttttttttttattttttttttttttttcggagttttttttatttttttggtttaaagaatgtttgggaggcgcggttgttatttagtgatttttaagaggtaaagttagatttggtttttaattttgttttttttgaaaagagttgaagagcgtttggttaattcggtagatgttattttgattttttttttatttattcggtatatgtcgtttttattattagtttttagggataatgttattatttgaattttgaaaggagaattttttatatttgtttaatggtgtattgttaagagggaggatttattatttagatattgagaaatgatcgaaatgtgagattagagggtaaaatatagtaaattttttaattaaaatggcgttattttaaatgtaggtaattttggtgatgtgttttttattttttattttattattagtttttttattttggattattttaaatgattttaattgggggagtaatttaaaatttaataggattaatttaaatatttttattttttttttttaatttggttgtttttggtaagagcgttgttaaatttttttatagattgtagcggataaagaaagatttagtttaaagattaggaaatagttttgatagttaagaagtttgatttttgtataggtaacgtttttatttcgtagtttttttttaaaggttaaagggtaatgtaaaaaataaataaataagtaaaaaaagttaggtgtacgtttttatttaggaaggaggagatgtttttggtttttttattttatttcgtgttgttttttttgtttttagtaagttgttgttatgttgtaataagttcggtgaggttgaatttgaatagaagagggagaacgagttcgcgttaagagttacgtcgagacgcgtcgtcggtggggttacgcgagatgtaatcggagagtttaaaattagtttaggattaattttttagggattcgtttaatttttttcgtagaagagtttaagtggggtagtggtcgttataggttgaggatgattttcggacgcgttttaggcgcgatcgtattattcgtttttagtttaaagtttgagtgatttggtattatttttttaattgttttttatttttttcgtatttttgttgtgtttatcgtttttacgtatttgagagtttaaattatgttaagacgatttggagaaacgttcgatttgttttttaagttacgtaaggatttatttagacgtacgttcgcgcggagacgtacgttggtatacgcgtttatatacgcgagtatatatacgcgtatattattcggttcgtgcgcgcgggtcgttgtttttgttgtattatgtaaaggtggttgggaaagcgcgttgatttatatttatatagtttattttttttttatagtatgtgattaatacgtatttcggggaggagggagcgcggttgggggtgttaatcggaagggaatagatagtgagtgttattttgttgggaggttttagaagtaaagcgttaacgacgatagtagcggtggttttagttttattagtaattgtcgttggtaggagtattatacgttttaggagtttttcgggtattaagtatgggtttagttcgttttagttattttttttttttatggttttattttcgttgttagtatttcgattttagtttgtaattttgattttgggtttgattataaatgacgaaagatcgcggtagtttttaaagtgcgggagcgagtttcgtattggttagcgcggcggagggatttttttaggaggttttaagtttttaagtttgtggagagatttggtaatagttggtaaggtttgttttagttattttcgttggttttttgtttttgtatttagcgtttgagggcgttattcgttttttttttgcgttttacgtaagcggtttaaggaatttattcgattcggatttcgtttcgtatgttttttaagttttcgttattttcgtaggcgttttagaaaggcgtgatggttttagtttagtgttcgttagttt

SEQ ID NO: 166 - DNA, 3016 bp, Artificial Sequence
  chemically treated genomic DNA (Homo sapiens)
tttttttttttttttggtagaattgttcgatggttttgattatgtttaggtttatttcgatgtagtagtaggtatggtcggttcggggttcgggatagttcgttacgtagtagtaatagttttttagggtgttgatttttttatatttggtttttttatataggcggtcgaagcgatcgaatagatcgtttaggagatttattagggcgtgggtagatttgttggtatttattttggtgaagtttacgatatttgtaaataaaatattgattttttcgatttgttgtattttaaaagggcggaaggttataggagttttttggatggaagattttttttttttgtttttggggttcgaggtggtatgttttttgatagaatttttattttttttatttttttgttttattaagttatcggttatgatttttggtattacggaatgaattattttttttttgagggttttttttatttttaggtttttttcgtgtataatggattgttttattttgaggaaggtgtttttggattttatttgggatatgacgaataggtggatttcgatggcgtggatgtagtcgtggagtagttttttgtttagtagtttttagtgtagggtttcggtttcgggcgaggggaagtaggttttatttcggaaatggtagttaaaggtttcgaaaaggatagagtaggttatttttagatataaatttaggtataaaggtaagtgtatgacggtatagagtaaaaagagtatttcgatgtatatggagaagttttttatttgagataagtaagtatttgtgggtcgggttgtggtcgtaaggttggagttgtcgtcgcgttttgagataggcgttaagatttggaattgcgtagttagggttagggcgaatattagtagggtgagagttagcgaggtttacgcgtaatgtcgggcgtatagtttggtgaaggtaaatagaaagaagtttatatatattaggaggaagtatagcgcgggggcgattatgacgattagtttggattttatgtggatcgtaaaatagatgttttatagaaggtaggcgaagtcgatgtagaagagcgtatatcggaatcggcgttgggtttgcgggaagtagcgttttaggtaggttttttttaggtttatcgagtcgaatttggggttttattagcggttggaggttttttcgaatagttggggtagttttttttgtttgcgtagtcggttttcgtcgtttattcgtcgggggacgttttcggagtttttagagttgttgtagttagaggagatgttgtatttgtagtgtttggggtggttgttggaggatagttgtttggggttgattttgacgcgtacgttgttgttgttttcgttggagtcgtagtttatttcggtgttgtggtgatgtagtagttgttggtggggtggggaagttatgttgtcgagtttcggggtttgtttcggtcggggttattagtatttgttagtaaaacggggagagttagcggcgtttttatttaggtatgtacgtttagaggttcgggatttgtttttgttttaaggggcggttttagtacgcgatttggataggtattatttgtttttgtggttttcggtttagcggtgtttttatcgtttttatcgtttttattttcgaggcgtacgagaatcgttcgggacggatttagaacgttcgggggttttcgtcgcgtggtcgtcgtggtttcgggatcgttttgttcgttcgtttttcgcgtttttcgtttcgagggtggttttcgcgtcgcgcggtttttttttttcgcgcgttcgttttttttagttgcggtttcggagggaagtttagattttgagcgtttttagtttcgcgagtcgtttgcgtataaataatttcgttggcggcgcggagttttttattttgtaggagtcgcgtttcgatgcgttaaaggcggcgcgcggtcggtttcgggttcggatttcgattcggagtagcgagtttcggcgggcgttttcggttcgcgtttttcggtcgtttttcgcgtttcgggtcggttttgttcgcggcggcgggcgttgggggtgggggcgtttcgggttgcgagtgcgcggagttcgtcggcgcggttcgtttagtggggtttgttttttttcgagtgcgtcgtcgttttcgtcgcggtcgtagttgtttcgggatcgagcgcgtggaattacggacgcgggtttttcgtcgggcggcggtgtagacgttgtcgtagagtcgggttttcgcgacgtcggtcgggacgttcgttcgttcgcgtttacgtcgggggtcgttttttcgagttagagatgcggtcgtcgtcgcgttcgtcgtcgtgtttttcgcggtcgttgttttatgtcggaagagttgtcgtcgttattattttcggtttttgtttcgttcgttgttattgatagacgcgcgttcgcgtcgtttttcgtttagtcgtagcgcgtacgcgcggttcgcgttcgtcgttatcgttttttggtttcggatacgcgtacgggtcgcgcgtcgtttcgttttggtgcgcgcgttgggttggggttgcggggcggggcggggcggggcggggcgcgcgttcggtttcgtttttcgtttcgggcggcgtcgtttttaggcggcgggttgtggtcgttgttcgcgtttcgggcgttgtgggttcgttttttttcggcgttttagaggtcgcgcgtcgttcggggtttcgattttgcggagagatttgaaggcgtttgtcgtggaagaagtcgttggtcgtaacgtttgggaaattaaaatgttgtttttttattcggtacgtttttgggataaatcgaagtttttaatcgttggatttttttttcgggaggttttttttgttttgtaagtaatgaatgcgggtttcggggtattcggtttgttttggatttgtttacggggcgatttttacgggtttagtttttaaagttgggtttatcgacgattacgttttttcg

SEQ ID NO: 167 - DNA, 3016 bp, Artificial Sequence
  chemically treated genomic DNA (Homo sapiens)
cgggggaacgtggtcgtcggtgggtttagttttggaggttaggttcgtgaaggtcgtttcgtgagtaggtttagggtaggtcgagtgtttcggggttcgtatttattgtttatagagtaaggggagtttttcgggagggaaatttaacggttggaaatttcgatttattttaaaggcgtgtcgagtgggaaggtaatattttgattttttaaacgttgcggttagcggttttttttacggtaggcgtttttaggttttttcgtagggtcgggatttcgggcggcgcgcggtttttgggacgtcgagggagggcgggtttatagcgttcggagcgcggatagcggttatagttcgtcgtttagaagcggcgtcgttcggggcggggggcggagtcgagcgcgcgtttcgtttcgtttcgtttcgtttcgtagttttagtttagcgcgcgtattaaggcggggcggcgcgcggttcgtgcgcgtgttcggggttaggaggcggtggcggcgagcgcgggtcgcgcgtgcgcgttgcggttgggcgaggggcggcgcgggcgcgcgtttgttagtgatagcgggcggggtaggggtcggagatggtggcggcggtagttttttcgatatgaggtagcggtcgcgggggatacggcggcgggcgcggcggcggtcgtatttttagttcggggaggcggttttcggcgtgggcgcgggcgggcgggcgtttcggtcggcgtcgcgggagttcggttttgcggtagcgtttgtatcgtcgttcggcgaggggttcgcgttcgtggttttacgcgttcggtttcgggatagttgcggtcgcggcgggagcggcggcgtattcggggggaagtaggttttattagacgggtcgcgtcgacgggtttcgcgtattcgtagttcggggcgtttttatttttagcgttcgtcgtcgcgggtagggtcggttcggagcgcggggggcggtcggggagcgcgagtcgggggcgttcgtcgaagttcgttgtttcgggtcggggttcgggttcggggtcggtcgcgcgtcgtttttgacgtatcggagcgcggtttttgtaggatggagggtttcgcgtcgttagcggagttgtttgtgcgtaggcggttcgcggggttgggagcgtttaaggtttgaattttttttcggagtcgtagttggaggaggcgagcgcgcgaggaggagaagtcgcgcggcgcggaggttattttcggggcgagaggcgcggaaggcgagcgagtaaagcggtttcggagttacggcggttacgcggcggggattttcgggcgttttaggttcgtttcgagcggttttcgtgcgtttcgaaggtgggggcggtgggggcggtgggagtatcgttgagtcgggaattataggaatagatggtgtttgtttaggtcgcgtgttggagtcgttttttaggataggagtaggtttcgggtttttaggcgtgtatgtttaggtgggagcgtcgttaatttttttcgttttgttggtaggtattggtgatttcggtcggggtaggtttcgggattcgataatatggtttttttattttattagtagttgttgtattattatagtatcgaggtgagttgcgattttagcggggatagtaatagcgtgcgcgttaagattaattttaagtagttgttttttaatagttattttaagtattgtaaatatagtattttttttagttgtagtagttttggggatttcgggggcgtttttcggcgagtgggcggcggaggtcggttgcgtaggtagaagaagttgttttagttgttcgagagggtttttagtcgttggtgggattttaagttcgattcggtgaatttggaggaggtttgtttggagcgttgtttttcgtagatttagcgtcggtttcggtatgcgtttttttatatcggtttcgtttgttttttgtggagtatttattttgcggtttatatgagatttagattgatcgttatggtcgttttcgcgttgtgtttttttttggtgtgtgtgggtttttttttgtttatttttattaagttgtacgttcggtattacgcgtggatttcgttggtttttattttgttggtgttcgttttgattttggttgcgtagttttaggttttgacgtttgttttaggacgcggcgatagttttaattttacggttatagttcggtttatagatatttgtttattttaagtggggagtttttttatgtgtatcgaagtgttttttttgttttatatcgttatgtatttatttttgtatttgagtttgtgtttgggggtggtttattttgtttttttcgagatttttggttattattttcgggatgaagtttgttttttttcgttcggagtcggggttttgtattgggagttgttgagtagggggttgttttacggttgtatttacgttatcggggtttatttgttcgttatgttttaggtgaggtttaggagtattttttttaaggtggggtaatttattatgtacgggaaggatttggaagtggaaaaagtttttaaagagaggatgatttatttcgtgatgttaagaattatagtcgatgatttaatgaagtagggagatgaggagagtgagaattttgttaagaggtatgttatttcgagttttaagaataggaagaaaaagttttttatttaaaaagtttttatagtttttcgtttttttaagatgtagtagatcgaagaagttagtattttatttgtagatatcgtgggttttattaagatgagtgttaataagtttgtttacgttttggtgggttttttgaacgatttgttcggtcgtttcgatcgtttgtgtgaggagattaagtgtgagaaaattagtattttgggagattgttattattgcgtggcgggttgtttcgagtttcgggtcgattatgtttattgttgtatcgagatgggtttgggtatgattaaggttatcgagtagttttgttaggagaagaaggaga

SEQ ID NO: 168 - DNA, 2497 bp, Artificial Sequence
  chemically treated genomic DNA (Homo sapiens)
tgaagattgtgtggagtgggaggtttgtgtttattttttttatttattggggaatgggttgagtggttgggggtaaagtgggatttaggggttttgtttagtttttattgtaggttaagtttttttttgcggttaagagttattgggttttttatttttttttggtttttattcgtagatttagatggttttatggtgatttagaggaggatgtattcgggcgttttttttgaggatggttgtagggattatttagggattgagtcgaggtgtagatatagttacggatttgggtgttgttagatatagaagggtgtgtagtaaagtgagttttacgtatgcgtagatttttttttcggtttttgttttttatggaaatataattgattatattatgattgattacggtagttttttagggtttttttttttttttttttttttttttttagaagttataaagggatatagaatatatttaaagattattttatgtttttagtggagaggtaaaaaaggttcgtttcggaatggggaagcggttgcgttttggacggagaggggcggggatttcgcgattgtaggcggagggagggcgggtgtcgttggcgtaggcggtgatagggagatatcgtcgttattgagtatttttatgtaagtttttttatttttttgtgtattagtgtttatattggggtaatgataaatgttgtgttgaaaaattatttgatggggttatggaaggaacggaaggaacggcgttttggttcgttcggggttcgcgtacgtcgttattaagtcgcgggggcgggtcggaggggagagttgcgttagttaggtcgttgttagatgacgagttcggggcgtgacggggtggagtatttttaaaaaagtgtatgtttaggatttcgtttagtgtatttttgcgcgcggcgggtcgggttgggtagttttataaatagtcgtggtgtgagtttcgaagggaattattagcgttttttgtttacggagttttaggtttataatggtagcggtcgttagtttcgcgttttttttgtgtttttcgtttttgtatttgttgtttggttggtttcgggtaggatgggtcggtgagttcggggatgtagtttaagtagggcgggggttaaatttgggaggttgtggattgtagcgggttttagaggaggggaggtttttggaaggatcggcgcgatttttttgaacgaatatcgcggttttttcgaacgtcgcggttttttcgaacgtcgcggttttttcgaatatcgcggtgttttcgaatatcgttgttttttcgaatatcgcgattttttcgaatatcgtgatttttttagatatgtttagttgaaggtatttagtttttttcggtggttttttttcgtcgggttcgttttttgcggttgttgtttgttttttaggttaggaggtttttggaaggatcggtgttgttttttcgaatatcgtggttttttcgaatatcgcggttttttcgaatatcgtttttttttcgagtaacgcgattttttcgaatatcgcggttttttcgaaaatcgcgattttttcgaatattgttattttatcgaatatcgcgatttcgtcgaatatgttcggttgaaggtatttagttttttttcgcggttttttttcgtcgggtttgatttttgcggttgttgtttgtttcgtaggttaggaggtttttggtagtatcggcgcgatgttttcgaatatcgcgttttattttaatatcgcgattttttcgaatatcgtgatttttttcgaatatcgtcgttttttcgagtaacgcggttttttcgaatatcgcggttttttcgaatatcgcggtattttcgaatatcgtcgttttttcgtatattgcgatttttcgaaatattgcgattttttcgaatatcgcgatttcgtcgaatatgttcggttgaaggtatttagttttttttcgcggtttttttttttcgggttcgttttttgcggttgttgtttgttttataggttaggaggtttttgggtggattagcgcgattttttcgaatatcgcggtttattcgaatatcgcggttttttcgaatatcgcggttttttcgaatatcgcgattttttagaatatcgcggttttttcgaatatcgcggttttttcgaatatcgcgattttttagaatatcgcggtttattcgaatatcgcggttttttcgaatatcgcggttttttcgaatatcgcgattttttagaatatcgcggttttttcgaatatcgttgttttttcgaacgtgtttggttgaaggtatttagttttttttcggggttttttttcgtcgagttcgttttttgtagttgttgttagtatcgtagtttagggggagtgttaaagaaggttgaaaaggaattgtaggagggtggagggattaaaaggttatagagggtaaggtagggcggggatttttggtgtagattcgtagttttattg

SEQ ID NO: 169 - DNA, 2497 bp, Artificial Sequence
  chemically treated genomic DNA (Homo sapiens)
tagtggggttgcgggtttgtattagggattttcgttttattttgttttttgtagttttttggtttttttatttttttgtaatttttttttagttttttttgatattttttttggattgcggtgttagtagtagttgtaggaagcggattcggcggaaaggagtttcggaggggaattgagtgtttttagttaggtacgttcggggagatagcgatgttcggggagatcgcgatgttttgggggatcgcgatgttcggggagatcgcgatgttcggggaggtcgcgatgttcgggtagatcgcgatgttttgggggatcgcgatgttcggggagatcgcgatgttcggggaggtcgcgatgttttgggggatcgcgatgttcggggagatcgcgatgttcggggaggtcgcgatgttcgggtagatcgcgatattcggggagatcgcgttggtttatttagaagttttttggtttatggggtaagtagtagtcgtaggaagcggattcggaggaaaggagtcgcggaggggaattgagtgtttttagtcgggtatgttcggcgagatcgcgatgttcggggagatcgtaatgtttcgggggatcgtaatgtacggggagacggcgatgttcgggggtatcgcgatgttcggggggatcgcgatgttcggggagatcgcgttattcggggggacggcgatgttcgggggggattacgatgttcggagggatcgcgatgttggggtagaacgcgatgttcgggggtatcgcgtcggtgttattagaagttttttggtttgcggggtaagtagtagtcgtaggaattagattcggcggaaaggagtcgcggaggggaattgagtgtttttagtcgggtatgttcggcgagatcgcgatgttcggtgagatggtaatgttcggggagatcgcgattttcggggagatcgcgatgttcggggagatcgcgttgttcggagagagggcgatgttcggagaggtcgcgatgttcggggagattacgatgttcggggagatagtatcggtttttttagaaattttttggtttgaggggtaagtagtagtcgtaggaagcggattcggcggaaaggagttatcgaggggaattgagtgtttttagttgggtatgtttggggagattacgatgttcggggagatcgcgatgttcggggagatagcgatgttcgggggtatcgcgatgttcggggagatcgcgacgttcggagggatcgcgacgttcggggagatcgcgatgttcgtttagggagatcgcgtcggtttttttagaagtttttttttttttgaaattcgttgtagtttataattttttaggtttggttttcgttttgtttaggttatattttcgaatttatcgatttattttgttcgggattagttagatagtaggtgtagaagcgggaggtatagaaggaacgcggggttggcggtcgttgttattgtagatttggagtttcgtggataggaggcgttgatggtttttttcgaggtttatattacggttgtttataaagttgtttagttcggttcgtcgcgcgtagggatatattgggcgggattttaggtatgtatttttttggggatgttttatttcgttacgtttcgggttcgttatttgatagcggtttggttgacgtaattttttttttcgattcgttttcgcggtttggtggcggcgtgcgcgggtttcgagcgggttaggacgtcgtttttttcgttttttttatggttttattaaataattttttaatatagtatttattattattttagtgtaaatattgatgtataggaagatgaagaaatttgtataggaatatttagtggcggcggtgtttttttgttatcgtttgcgttagcgatattcgtttttttttcgtttgtagtcgcgaagttttcgttttttttcgtttagggcgtagtcgtttttttatttcggagcgaattttttttgtttttttattaaaagtatgaggtggtttttgagtatattttatatttttttatgatttttggaaaaaaaaaaaaagaaaagaaagaaagttttagagggttatcgtgattaattatgatgtgattagttgtgtttttatggagagtagaagtcgagggaagagtttacgtatgcgtggggtttattttgttatatatttttttgtgtttaataatatttaaattcgtggttgtatttgtatttcggtttagtttttggatggtttttgtagttatttttaaaagggacgttcgagtgtatttttttttgagttattatgaaattatttagatttgcgggtagaagttagagggaggtggagggtttagtggtttttggtcgtaagggagggtttagtttgtagtaaggattgggtagagtttttgagttttattttgtttttagttatttagtttattttttaatgaatgagaaaaataggtatagattttttattttatatagttttta

SEQ ID NO: 170 - DNA, 3095 bp, Artificial Sequence
  chemically treated genomic DNA (Homo sapiens)
ggttattatattcggtagcggggtggtttttagtttttgttgttttttcgtttttttttttcgttcgttttcggagtttagtcgatttttgaggttttaattttatttatttttttttcgggtcgtcgtcgtcgcgtttttttttatttttattttttcgaggagagttataggttgtaaatttaattaatttcgtaatttatttttgtaaaattatttataaagatttttttttcgcgttcgcgttcgtttttttcgcgtcgggtttttttagttacggttataaagtgtttttttttttttttgagttttgtatataaggaacgcgggttggggttttgttcgttttttttttcgtttaaggtaaggatttcgggaatttgaagtttggcgtttattacgtttaggttcgtagttttttttttatagagtttgtattatgggaaaaaataaaataaaatttaggaaagggaggtaatagttattgggagttaatatagagttacgtagcgtttaaaatataaatatcgtagcggttagaaatttcgttatttttttcgtttttttaggttgttttgtcgaggttttttgagttttttcgtatattgaaaggtatcgtaggtgtagtgcgtattttttttttatttattttaagaagttttgtttcgttattagttttttttttcgggatgagtagggagagcgcgcggaggttttcgattttttcgattataattaagaaagaataatttttaaagtgtttaatattttcgtttttaagttttttaaaatataggggtagggaatattaaaatattcggtttttattaggaagattacggttttgaaaggaaatagtagatacgatattttattttatttggatttatgattaaaaaaataaaaataaaaatttaaagagttcgtttgtattttttttttttaaatttcggttcggttcgaaggtagggaatttaaaagatcgaggtcgatggaagagagttagcggggcgagcgagcgggtagtttttttttttgtttttcggagttatttagaaggataggggaagggaaggaagaagaggcgaggaaaaagaggagggagggaagcggaggttaggagcgacggagtaaggaaagtagtttgtaagcgagaaaagagggaaaaaatatagtcgtacgaatttagagagattataagtcgtacgtaagtagtagtagaaagagcgagagcgcgagcgcgcgtttttttcgcggtttggggttagatagtttttagattagttcgaattattttttaagtattgtttcgttttttttgtttcggtcgttttttaatttttttttttttttttttttattttttttttaaaaattaaaataatataagggagggtggtaaaagtttttttaaatcggtcgatttatttaaagataataataataataataaatatataataatttatattttatggtgggagagacgtgggattaattttcggtatttattttaatatttgatagttagaataaataaatatatatatttatattaatagatatatatagaaaatttggagttaaagtatttggtaagagcggaaaaaaaaagaattaaaaggtaaaataatgattatgagtagcggcggcggtagcggtattagcggtaatagcggcggcggcggtagtagtagtagtagcggcggtagtaatagtaataattatttggtgttcggttttttttagaaattttttgtattattatttttaagaattttagttttaagaattaatagagtttaattttcggaatttgagtttcggattttattattgttacgtggtaggggaggatttggtgttagtttttcgagatttttattgtttttggttaattaaaagtttttaaagttataagatttttttattggtcggtatatttcgaggtttttataagtagagcgtttcggatttggaggtttcggttcgaggttcgaggggtttgaaggtggtttttttttttcgggtttaagacgatggtatggtttgtttcgttattattacgtgggttttttttttgtgacgtcggcgttttcgttgtagtaaagttcggtttttggaattttgagaattaatttgttattcggtgatataagagggggagtgcgttttgttttttcggggtttggggttaatttttttttttttatttataaatttagtagatcgagttaaatgtataaaagggagcgagaggtttgaattattgggaaaagtatgttatatatatagtagggttagagaggcgagtaagagaaaaataaaataaaataaatattatagttttttttaattagaatattaggtattacgagaaaaatatttgttaagtagttttcggtgggtttatttgttttatttttatttaggataggggtttttgttgttgttttgggtttttttttttttggtgtggtggtttgggatttttggtttttgtattttgatggtttatggatttttgtttttgattttttgttttttgtaagtttgtggtgttacgtaaattataggatcggtatcggttggatttttttgtacgtgttttttttttttttatttaattttttaagcgttttaaagatgtattattttaatattaatattattgaaagaagtttaaatttttggttatatgtaataattttagtttttatttttttttttttttttttttttggtgtaatttttttttttttttttggatttttgttgaagtgtgttttttttgtattttagagaaatgtttaaaggatttgttttggtttggtttgtttttttttaggatagtaagtggtgggtttaatttgttattgttgatttttgggaaattttttgttgtaagaaacgtgtgtgtgggggggagggtgggggtggcggggtggtatgtgtgtgttttttataaaattttgtgagttaaatatttgtttgtgttttgtttttttttaaggttttgagatttttgttttcgaggttcgttttaaggtcgttgtaaaaaaatttttttagtttgtgtttaagagattagtcgg

SEQ ID NO: 171 - DNA, 3095 bp, Artificial Sequence
  chemically treated genomic DNA (Homo sapiens)
tcggttgattttttaaatatagattgaagagatttttttataacgattttgaaacgagtttcgaaaataaaaattttaagattttaagagaaaataaaatataaataggtatttggtttatagaattttgtagaaaatatatatatattatttcgttatttttatttttttttttatatatacgttttttgtaataagaaattttttaagagttaataataatagattaaatttattatttgttgttttggaaagaaataaattaaattaaaataaattttttgaatatttttttgaagtgtaggagagatatattttagtaaaagtttaagggggaaaaagaaaattgtattaaaggaaaaaaaaaaaaaaaaagtgggggttgggattgttatatatggttaaaaatttaagttttttttaatagtattagtattgaaataatatatttttaaaacgtttgagggattagatagggaaagaaaaggtacgtataaaaaaatttaatcgatgtcgattttgtgatttacgtaatattataaatttgtaaaaggtaaaaaattagaagtaaaaatttataaattattaaaatatagaaattaaaaattttaagttattatattagaaagaaaaaaatttagaataatagtaaaaatttttgttttaaataaaaataaagtaaatgaatttatcgaaaattgtttggtaaatatttttttcgtggtgtttaatattttagttggaaagagttgtgatgtttattttattttattttttttttattcgtttttttaattttattatatatataatatattttttttagtggtttaaatttttcgtttttttttgtgtatttagttcgatttgttgagtttatgggtaagaaagaaggaattagttttagatttcgggaaagtaaagcgtatttttttttttatgttatcgaatagtaaattagtttttagaattttagaggtcgagttttgttatagcgaaggcgtcgacgttatagaggaggagtttacgtgatggtggcggagtaggttatattatcgttttgggttcggggagggagagttatttttaggtttttcgagtttcgaatcggaatttttaaattcgagacgttttgtttatgaggatttcgaaatatgtcggttagtgaaaaaattttgtggttttgagggtttttggttggttaggggtagtaaaaatttcggagagttgatattaagtttttttttgttacgtagtagtggtaaagttcgaagtttaaatttcgagaattgagttttgttgatttttagaattggggtttttagaagtggtgatgtaagaagtttttaggaaaggtcggatattaggtgattattgttgttgttgtcgtcgttgttgttgttattgtcgtcgtcgtcgttgttgtcgttggtgtcgttgtcgtcgtcgttgtttatgattattattttattttttaatttttttttttttcgtttttgttaaatgttttggttttaagttttttatgtgtatttattgatataaatgtatatatttatttattttagttgttaggtgttaaaataaatgtcgaagattagttttacgttttttttattataggatatagattgttatgtatttattattattattgttgtttttgagtgaatcggtcggtttggggaggtttttgttatttttttttgtgttgttttggtttttggaaaggaggtggaggagaggaaggaggggaattagggggcggtcggagtagagaggacgagatagtgtttggggggtgattcgggttagtttgggggttgtttggttttagatcgcggagaggacgcgcgttcgcgttttcgttttttttgttgttgtttgcgtacggtttgtgatttttttggattcgtgcggttgtgtttttttttttttttttcgtttgtaaattgttttttttgtttcgtcgtttttggttttcgtttttttttttttttttttttttcgtttttttttttttttttttttttgtttttttgggtaatttcgggaggtaaaaagggaggttgttcgttcgttcgtttcgttggtttttttttatcggtttcggttttttagattttttgttttcgagtcgaatcgagatttggaaggaaaaaatgtaagcgaattttttgggtttttgtttttgtttttttggttataaatttagatgagatgaagtatcgtgtttattatttttttttagagtcgtgatttttttaatgagagtcgagtgttttggtgttttttgtttttgtgttttggggagtttgggggcggggatgttgaatattttgaaaattatttttttttggttgtagtcgagggagtcgggaattttcgcgcgttttttttgtttatttcgaggagagagattgatggcgggatagggttttttggggtgggtgggaaaggggtgcgtattgtatttgcgatgttttttagtgtgcggggggatttagggaatttcgataggatagtttgggagaacgagaaaggtggcgggatttttggtcgttgcggtgtttgtattttgggcgttgcgtgattttgtgttggtttttaatggttgttgttttttttttttaaattttattttatttttttttatggtgtaagttttgtaaaaagggaattgcgggtttgagcgtagtggacgttaggttttagattttcgaggtttttattttgggcgaggagaaagacgaatagagttttagttcgcgttttttatgtgtaagatttaggaggagagaagggtattttgtggtcgtggttgaggggattcggcgcgggaggagcgggcgcgggcgcgaaagggagatttttgtgagtgattttgtaaaaatagattgcgaggttggttggatttgtaatttgtggtttttttcgagggagtaagaatgggggaaggcgcggcggcggcggttcggggagggagtgggtagagttggagttttagaaatcggttgagtttcgggggcgggcggggagaaagggcgggggggtagtaggagttaggggttatttcgttgtcggatgtagtgatt

SEQ ID NO: 172 - DNA, 2478 bp, Artificial Sequence
  chemically treated genomic DNA (Homo sapiens)
ttatgagatttaatttggttgttttttttgttgagtgagttattaaaggttttttgtggggtggaggggcgtgagggagtagattatagattttatgttagtattaattttatatttatttgttgttgggtttttttttgagtttaaaatgagttagaatttagggttttagttttggattatgtaatttgttgtttttttttaagttatgtttgatttggtttaaaagtaattttttttttatttgtatttttaattttaaggaagtgggagagttagagtaagttaagtaaattgcggttttagtaatttgtttttcgatttttaaagtttaagggaaggtatgttgagagagtttgttaatttcgtttcgatataagaaaaatgataaaattagttattgatatttttttgattgtatttattttagatttgggaaagaatatttggtttgttataaatataataggagttatatattttttatttttattttttttttttaaagtaagatgattttgtaaatatttttatgaaggattcgtttataaaaaaataaaaattagttttagttgttggtgtattattaagttgttgattaggtatgaaataagtgtaataggtaatagttaatttaatagtttttttttgatttttatatattgagtaaaagttatataggttaaatggaagtttagtgattagttttagatttgaaataaaatttaaattttgtttgtgagaagttttatttgagttaagtttattttttgttgggatatattgttatttgtaatgattttagtttttagtattattttttatttaaatttttttttataaaattgatttaggtaatcgatttaaaggtaagttagtttttatagaaagatagatatttaaaaaaatgatttagataaataaattatatttttatagttaggaatttagagtcgaattaatttaattagatgtaaaattaatgagaatttcgagattttcgacgttttattttagaatttttatttaggtgcggtcgggagttatagtttttgaatattttttcggaattttttttttatttgatttttaagtttgttatggggtttttttttaatggtattgatttgtaattatttaacgagtagcgggatagtttcgggtaggacgtattttgggtgggtgacgtgatttcgtagtttttttttcgattttatattttatataatgattttcgtttatagaagttaagggggaaagatgacgtttttaaagttcgaatttttttattttggagttagaattagcgtcgtcgtcgttttttgtagtttagtcggtaacgcgcgtcgagtttcggggcgtagtttggagacgcgtttgttcgttttgggaaggggtacgggacgtacggtttttcggttttagttgtatagtttagttcggggtttttatttattttcgtttagagttatattcggttgttttttttgattattcgatataaagagattcgtcggtggaaagaatcgattttaaaatttaagtttatcgttgtttaataaggcgcgtacgttttttttcgtttggttttatatgttttaaatttttagtaatagaaatgaggaagtagtagtttttttcggttgttggcggaggtagtgggtgtaatttgtgaagtttcgtgttatgatgaatttggttatttgggtgtgttggagagggttggtcgtttttttttttttttttttattattatttttttttttttcgtttttttttttaatttaatttttttttttggtattcgtcggttgttatttagaattttagtattttttttattatatttttgggggtaatgtatttcgaaaaggttttaattattttacggatgaatttggttattttgtataaagcgtgagtgtttgttaaataattttttatagtacgtggtaaaaaagtagcgttttttaaaagatataaaaggttagtaatgttatataagcgttttttattagttttttaaggatagaaacgtgggtagtttatttagtggagatttaatttttaaatatttattgaaaaggagtgaagggtagaaaaatagaaattaaatttttagttggttgtttttttttttatatgtattagaaagtatttttaatatataatatatatttgaaaagaatataatgaatatttacgtgtttattatgtagtataaaaaaattaaaattatttatatagtggaaattatttgttaatttttttttcgttgaaatatatttttttttttttttttttggaaagaaaattgttttaaatttgattttttatgagtaatttttatattagtttttaaaaatgtgaaagggaatatgttaatttaaagtttattagaaagttatgtaatgaatatttttttgttgtgtttgattttggtttttaaatagaagtttttttaaataaaattttaaa

SEQ ID NO: 173 - DNA, 2478 bp, Artificial Sequence
  chemically treated genomic DNA (Homo sapiens)
tttaaagttttatttaaagaaatttttgtttggaaattaaggttaagtatagtagagggatgtttattgtatggttttttggtaaattttaagttagtatgtttttttttatatttttagaaattgatataaaaattgtttatgggaaattaaatttggggtagttttttttttagggggaaggaaagagggatgtattttagcgaggaagaggttgatagatagtttttattatgtgagtaattttaatttttttatgttatatggtgggtacgtgggtgtttattatattttttttaaatatatgttgtatattggaaatattttttagtatatatgaaagaaaaggtagttaattgaaagtttggtttttgtttttttgttttttatttttttttaatagatgtttgggagttaggtttttattgaatgaattatttacgtttttgtttttgaagggttggtggggggcgtttatgtaatattgttggttttttatattttttaagaggcgttgtttttttgttacgtgttgtagaaaattatttgataagtatttacgttttgtgtagggtgattaggtttattcgtaaaatggttaagattttttcgaaatatattgtttttaaggatgtggtggggagggtgttgggattttgagtgatagtcggcgaatgttagagggaagaattaaattggagagggaggcggagaggagggaggtgatggtgggaggaggaagggaggagcgattaattttttttaatatatttaagtgattagatttattatagtacgaaattttataagttatatttattgttttcgttagtagtcggggaaggttgttgtttttttatttttgttattggaagtttgggatatgtgaagttagacggggagaaacgtgcgcgttttgttgagtagcggtgagtttgaattttgaaatcgattttttttatcggcgaatttttttgtgtcgggtggttaggggaggtagtcgaatgtggttttgaacgaggataggtgagagtttcgagttgagttgtgtagttggggtcggggaatcgtgcgtttcgtgtttttttttagaacgagtaagcgcgtttttaagttgcgtttcgaggttcggcgcgcgttgtcggttgagttgtaggggacggcggcgacgttggttttggttttagggtaaagagattcgggttttgaaagcgttattttttttttttgatttttgtaagcgaggattattgtatgggatatggggtcggggaggagattgcgggattacgttatttatttaggatgcgttttgttcggggttgtttcgttgttcgttgggtaattgtaggttagtgttattgaaaaagaattttatgataggtttgggaattaagtgagaaaaaagtttcgaaggaatatttagaagttgtggttttcgatcgtatttggatgggagttttggagtgggacgtcggaagtttcggggtttttattaattttatatttgattaaattagttcgattttaggtttttggttgtggaggtgtgatttgtttatttggattatttttttaaatgtttgtttttttgtgaaagttagtttatttttggatcgattgtttaagttaattttgtgagaggaagtttgggtggaaggtggtgttgggggttgggattattgtaagtggtagtatgttttagtaaaggataaatttagtttaaatgaggttttttatagataggatttaggttttattttaagtttggagttggttattgggtttttatttggtttgtgtagtttttgtttagtgtgtaggggttagagggaggttattgggttaattgttatttgttgtatttgttttatatttgattaataatttaatagtatattagtagttggagttggtttttgtttttttgtaagcgaattttttatgagaatgtttatagaattattttattttgaggggaagaaatgaaggtgaaaaatgtgtggtttttgttgtatttatagtaagttaaatgtttttttttaggtttggggtgggtataattaggaaaatgttagtagttgattttattattttttttatatcgaagcggaattggtagatttttttagtatatttttttttgaattttgggggtcgggaggtaggttgttggggtcgtagtttgtttagtttgttttgatttttttatttttttgaagttaaagatatagatggagaggaaattatttttaaattaaattagatatggtttagggaagaataataggttgtatgatttagggttagagttttgagttttagtttattttgagtttaagaaaggatttagtagtaggtagatgtgaaattgatgttgatatgaggtttgtgatttatttttttacgtttttttattttataaggaatttttagtaatttatttaataggaaagataattaaattggattttatga

SEQ ID NO: 174 - DNA, 2728 bp, Artificial Sequence
  chemically treated genomic DNA (Homo sapiens)
tttttatttataaaattaagttataaaagaaaaaaagaaatagtggaatgagaggtaagagcgcgtaagtaagagtaggtgtgaacggttgtatgcgatggtattcgttatagttgggatattagagagagttagattttaggttagatgtattataggggttttaggatagtttatcgttttttttttaggattggttttggtatgtaattttagtagttttaggtagttgtttttcggcggaatttttaggagtgggggtatttattagcgttgatttgcggggttttagttgaggatagttcggtcgtgggagtttataaagtaatggataataggtaatgttttttttgtttaatagtagtggttagagggatagatttatttttatagagattgttaggtattgtcgttatagatacggtttttttttcggtatttagttttgtttgttttatataggagtataggaaaggaatttttaatgagtttattttttatgttaggagagaggtaaggtgttgagttttttattcggggagtttagttgtattttttttttagtttttatttttttgatttttttttttttttattatttttaattagtggtttattattttttttttagttagttttggttgtgatgttaagcggttttgtcggattttatattttgtttggtttttaaaagggtattgatttgagggtataaatgtagaggtttcggggtagttaggtagtcgcgagtaatttagtatttagttgtttagggtgttttaggtagcggcggtagtagttagaagttggtgttattattatataagttaggtaaattttgttttagtatatagagcgtatttaattagtaggaaggaaataagttaaaattttttcgatattatatatatatatatatatatatatatatatatatatatatatacgagtttgaggataaggataaatattttgtagaaagaattttttttttattttatcgacgtttaagtttttgttttaggattttttattttttagtagtttttaaaattttcgtgtttgattattttttttaatatatgggatagagagaatttggttaattttaaattttgttttttgagtatttgtttataaatagtagggggagtgatggggacgtttttttgttttttttattatttttatttttgttttttacgttatttttaggttgatagcgtcggggaaagatattagattattaatttagttttttttgttagttggggaaataatattcggttattaatagtatttaattatttagagagcgagagtgagtcgaggtaaatacgtcgggttttagatatcgttttagttttcgagattcgggtttgtaaagggttgtatacgttcgtcggagggtcgttgtcgttttcgagaaaggatttgaatttgagttcggtgaaggtaaaatgatatagagatttatttttaggttgtgtgtggggttgacgatatagataagttgttcggtagcggagaaaattcgtttagttttgtagtgttgaaatcggagatgaatgagatttaatatagttttaaagtattgggtaaagaaaagtattataatttttggggggttgttggttcgggaaggtagcggaggaagttgtgagtttttgggttttggaaggagcgtagtttttgagatatttcgttttagttcggtttagcgcgtttttatatttattattaaaataagacggttagaattttgtagtagtgaggcggttaattaaaaggatagaaatgttatttttgaggtgtagagatagttaataataaatgttttttttatcgaaattttttgatgaattgagtttggcggagaatgtattattgaatattattatagattagtatattgtatttattttgtgattatagttaattatatttaatgttggggagataggttgataaaattgattgtttaatgtgtttttatttattaattgatttaatttaatatgagagttttttttaatgttttggtaagaacgtaaagcgtttaagtcgttaaatagtataatatttcgttttaaagtaggtagatggataacgtagattatggttcgatttattagagttgtttgggagaaaataaaatattattagattttgaatttagataaggatttggtagtagtaaaaatgtgtattttttaattttgcgttttgattttttgtaatttggattatagttttttgataaattttattttttattttttattaaagaaaagaatttttgataaatttatttggagttgaggggtggagggaagtatatatatatatattattatatatatatatatatttttttttttttaaaatattgtgattattgaagtttgaaagtattaaaggataaaaatgtatagagtatgttttaaaaaataatgaaatttttgatgtatgaatgtatatatatagaaaaatttatattgagaggaaagaggtttgtaaattagtaaaataattatagatgtagagaatttttgtttgttatttatttgtatattggtgggtagtaaattgttaattaattattagattgttggagatattaaaatagagattaaggatgtatatattatattatttatttgtttttgtaaatgttagtagtatatttttgtgttggtataggtagagggtattttagtttttagat

SEQ ID NO: 175 - DNA, 2728 bp, Artificial Sequence
  chemically treated genomic DNA (Homo sapiens)
gtttgaggattggaatgttttttgtttgtgttagtatagaaatgtgttgttagtatttgtagaaataagtaaatgatgtggtatgtgtatttttaatttttattttaatgtttttagtaatttagtggttaattagtaatttgttgtttattaatatgtaaatgaatgataagtaaaggttttttgtatttgtaattattttgttgatttataagtttttttttttttagtgtaggtttttttgtgtgtgtgtatttatgtattagggattttattattttttgaagtatattttgtgtatttttattttttaatatttttagattttagtaattatagtattttgaaaaaaagaaaatatatatatatgtatagtaatatatatgtatgtgtttttttttattttttaattttaaatgaatttgttagggatttttttttttgataaagagtggagagtaagatttattaaggggttgtaatttaaattgtagaaagttagaacgtaagattgaaagatatatatttttgttgttgttaagtttttatttggatttagagtttagtaatattttatttttttttaagtagttttggtgagtcgagttatgatttgcgttatttatttgtttattttggagcggggtgttgtattatttggcggtttaaacgttttacgtttttgttagggtattaagaaaggtttttatgttaaattaagttaattaataaatggagatatattaagtaattaattttgttagtttatttttttagtattaggtatggttggttgtaattataagataaatgtaatgtgttgatttatggtaatgtttaataatatatttttcgttaggtttaatttattagggagtttcggtagggaaggtatttgttattggttgtttttgtattttaaggataatatttttgtttttttgattggtcgttttattgttgtaagattttaatcgttttattttgatgatgaatatgaaggcgcgttaagtcgggttggagcggagtgttttagaggttgcgttttttttagggtttaaggatttatagtttttttcgttgttttttcggattaataattttttaaaagttgtgatgtttttttttatttagtgttttggggttgtattagattttatttattttcggttttagtattataaggttaaacgggtttttttcgttgtcgggtaatttgtttgtgtcgttaattttatatataatttaaaggtgagtttttgtgttattttatttttatcgggtttaggtttaagttttttttcggaggcggtagcgatttttcggcgaacgtgtgtagttttttgtaaattcgggtttcgggggttgggacggtgtttggaattcggcgtgtttgtttcggtttattttcgttttttaggtgattgggtgttgttagtgatcgagtgttgtttttttagttggtaggaaaagttggattgatggtttgatgttttttttcgacgttgttaatttgagagtggcgtggggggtagaagtgagggtggtggagggaataggggggcgtttttattattttttttattatttgtgggtaagtgtttaggagataggatttgaagttagttaaattttttttgttttatgtgttgggagaggtggttaaatacgaggattttagaagttattggggggtgaggaattttgaaatagggatttggacgtcggtggggtggggggagggttttttttgtaaagtgtttgtttttgtttttagattcgtgtgtgtgtgtgtgtgtgtgtgtgtgtgtgtgtgtgtgtgtgtggtgtcgggaggattttggtttattttttttttgttggttagatgcgttttgtgtattggagtaggatttgtttggtttgtgtaataatgatattagtttttagttgttgtcgtcgttgtttggagtattttaggtagttgggtgttgggttgttcgcggttgtttagttgtttcggggtttttgtatttgtatttttaggttagtgtttttttagagattagataaaatatggggttcggtagagtcgtttaatattatagttaagattgattgggaaaggaatgatgggttattggttaggggtagtagggaggaggggaagttagggaggtgggggttggggagagggtgtagttgaatttttcggatgggaaatttagtattttgttttttttttaatataaaagatggatttattggaagttttttttttgtatttttgtgtaaggtaggtaggattgagtgtcgggggaggggtcgtgtttgtagcgatagtgtttgatagtttttgtgaggatagatttgtttttttgattattgttgttgggtaggaagagtattgtttgttgtttattattttataaatttttacggtcggattgtttttagttggagtttcgtaggttagcgttgatgggtgtttttatttttagaagtttcgtcgaaagatagttgtttggagttgttggggttatatgttaaggttagttttgggggaggggcgatggattattttgggatttttatggtgtatttgatttaggatttgattttttttgatattttagttgtgacgaatgttatcgtatgtaatcgtttatatttgtttttgtttgcgcgtttttgttttttattttattattttttttttttttttatagtttagttttataaatgagaa

SEQ ID NO: 176 - DNA, 2728 bp, Artificial Sequence; identical to SEQ ID NO: 174
  chemically treated genomic DNA (Homo sapiens)

SEQ ID NO: 177 - DNA, 2728 bp, Artificial Sequence; identical to SEQ ID NO: 175
  chemically treated genomic DNA (Homo sapiens)

SEQ ID NO: 178 - DNA, 2728 bp, Artificial Sequence; identical to SEQ ID NO: 174
  chemically treated genomic DNA (Homo sapiens)

SEQ ID NO: 179 - DNA, 2728 bp, Artificial Sequence; identical to SEQ ID NO: 175
  chemically treated genomic DNA (Homo sapiens)

SEQ ID NO: 180 - DNA, 2437 bp, Artificial Sequence
  chemically treated genomic DNA (Homo sapiens)
agttttggatgataaggacgtaattgtttagggcgttggtcgagaggaataggaagagcgtttcgtggagtagggcgggcgagaagagtcgggcggtcgcggggttttcgcgtatgttgggtaggaagaggaagagttgtagtacgaaggttattagggagatgtataagaagtaggcgggggttattacgttgagtagtcgtagggttagtattttcgattatatttttgcggggttcggggtgagaagaggattgattgattacggcgtttagggggcgttttcgttcgttttttcgtgtcgcgcgtttggggtattgtacgcgattttacgtttttaattttttgtttcgcggattttttttttttagttttttaatttcggattaggtaggttagagattcgagttcgtagcggtttcgggtttaggttttatttgggggtgagtgttgtttggggttttgagcgagttcggcgttttggcgcggtagagtttggtataggagggagggattcgtttgtagtttttaggagttgtgagggtggggggtatcgggggataggattttttttttttgtggatgtggaaataagtttaggtttgggatttttggtttagatttttttaggaggagaaagggaaggatttggggtcgggggtaggagaattagcggtatttgatttgttggaaattttgttttatattttttttttttcgtttttgcgtttttatttatatatatattttgggtagtatttagggattttattaggttatttaaggttttttggaggtatgtgtgcgtgagggattacgatgtgtgtgtgtgtgtttttgtttgtgattttgtacgtgtaatttgtgtgcgtttgagtatttgtatttgtgtatgtatatatttgcgtgtatagatacgtagtttttgttatttagttttaaaaaaattaattgaaataatcgatatatttatattcgttttcgggtatcgggtgaggtgggggcgtaattagaatatttgtgttagcgggttttggttagtatatttttttaacgttggttgttcgggttatttttttgcgaagagcgtttttatttgaggcgaaattaaaatttttttttcgcgttcgtttttcgtttttttgttgagagaaatttaaataatttttatggcgtcgaaattttttttatgtcgataagttcgttttgggcgtacgagtggatgtttggttagttttttttgggatcgatttcgtcgtcgtgtttagtttttattacgtttttattttattttacgttttatagtcggggtttttggttagtttcggaagttatcgagaaataggatttcgtgcgttcgagagaatttttttaggggttaaggaatcggttagtcggaggcgcgagaaaagttttgggaaggcggttgtatttaggatgggtggatgttacggggttttcgtttaggttgtttcgttcgtacgggtcgattggttattttggaattttttttgtaggttttagcgtttttcgggaattcgtagttttcgcggagagcgtgggtttttttttatcgttggggcgtagcgtagtgtacgtttgagggtggtcgtcgggggttgggtacgtttttagttttgcgtcgtcgggggttgcggcggtgttgtttattttagagagttttcggtttggggtttcggcgaagtaagtgttttttcggcgtcggtcgttaggggggcgcgggagtagttagatgcgtcgtagcgttgggaaggcggcgaaggataggggttaggggagtgaggggcgttcggtaggtagttttagttttggttttgcgcgggagaagggatagtagagatcgttcgtggggtttcggggtgtagggagttgttcgtttagttttggcgttcgtttcgttcgcggtagagggcggtatagtcggagttttggaaagatcggtagcgtcggtagtcgcgggtttttcggttattgtttttcggacgtacgggaagtcgtttttcgcgtcgtcgtcgtcgtattgtcgtcgtcgtagaggggtgaggaaattaatttatcgagttttggtcgtcgataagaggagtttcggacgtcggttttcgttttgttcgaggttgtaaagttgtggattcggttcggttggttcgtagtttgcgtttcgtttcgggaattgggtaagtagcggggatgtggggaggagggagcgggtagttgttggttttttatttgggcgttagcgagtaagggttaggaagcggcggggatggtagttgggtattttttagtttcgttattttttttttcgtttttgggggcggtgttttggtcgttagttttagtatcgtggatttgttttttttttttttttcgattttttttgagcgggttggggcgttttgtttggttttagcgttcg

SEQ ID NO: 181 - DNA, 2437 bp, Artificial Sequence
  chemically treated genomic DNA (Homo sapiens)
cgggcgttgaaattaggtagggcgttttagttcgtttaaggggaatcgagaggggaggagggggtaagtttacgatgttgagattggcggttagagtatcgtttttaggagcggagggaggggtggcggggttggggggtgtttagttgttattttcgtcgttttttggtttttattcgttggcgtttaagtgggaagttagtagttgttcgtttttttttttttatattttcgttatttgtttagttttcgaagcgaagcgtaggttgcgagttagtcgggtcgagtttataattttgtagtttcgggtagggcgagagtcggcgttcggggttttttttgtcggcgattagagttcggtgagttgatttttttatttttttgcgacggcggtagtgcggcggcggcggcgcggggggcggtttttcgtgcgttcgggaggtagtggtcgagaagttcgcggttgtcggcgttgtcggtttttttaaggtttcggttgtgtcgttttttgtcgcgggcgaggcgggcgttagggttgaacggatagttttttatatttcggggttttacgggcggtttttgttgttttttttttcgcgtagggttagggttgaggttgtttgtcgagcgttttttatttttttagtttttgtttttcgtcgtttttttagcgttgcggcgtatttggttgttttcgcgtttttttggcgatcggcgtcgggaaggtatttgtttcgtcggagttttaggtcgagggttttttggggtgggtagtatcgtcgtagttttcggcggcgtaggattgggggcgtgtttagttttcggcgattatttttaggcgtgtattgcgttgcgttttagcggtagggagaggtttacgtttttcgcggaggttgcgggttttcggggggcgttgggatttgtaaaggggattttaaggtgattagtcgattcgtgcggacgggatagtttggacggaggtttcgtggtatttatttattttaggtgtaatcgtttttttagaatttttttcgcgttttcggttggtcgattttttagtttttggaaaagttttttcgggcgtacggaattttatttttcggtggttttcgaagttggttaggaatttcggttgtgaggcgtggggtgggatggggacgtggtgagggttgagtacggcggcggggtcgattttaggaaaggttggttaagtatttattcgtgcgtttagggcgggtttgtcggtatggaaaggatttcggcgttatgagggttgtttgggttttttttagtaggagggcgggaggcgggcgcgaaggggggattttaatttcgttttaaatgaaaacgtttttcgtaaagaaatagttcgggtagttagcgttggagagatgtgttggttaggattcgttgatataggtattttggttgcgtttttattttattcggtgttcgagagcgagtgtgagtgtatcgattgttttaattgatttttttaaagttagatagtagaggttgcgtgtttgtatacgtagatatatatatatataaatatagatatttaagcgtatatagattatacgtatagagttatagataaggatatatatatatatatcgtggttttttacgtatatatatttttaaagagttttgggtaatttggtgaggtttttgagtgttgtttaagatgtgtgtgtgggtggggacgtagggacggagaaaggggagtgtgaagtaggatttttagtaggttaagtgtcgttgatttttttgttttcgattttaaatttttttttttttttttttagggaggtttgaattagaaattttaaatttgggtttgtttttatatttatagaggggaggagttttatttttcggtgttttttatttttataatttttaaagattgtaaacgagttttttttttttgtgttagattttgtcgcgttaaggcgtcgagttcgtttaaaattttaggtaatatttatttttaggtggggtttagattcgaggtcgttgcgggttcgggtttttggtttgtttgattcggggttagggaattggggaggggaaattcgcgggatagggggttgggggcgtggagtcgcgtgtagtgttttagacgcgcggtacggaggagcgggcgagggcgttttttggacgtcgtagttagttagttttttttttatttcgggtttcgtaggaatgtaatcgaggatgttggttttgcggttgtttaacgtggtggttttcgtttattttttgtgtatttttttggtgattttcgtgttgtagttttttttttttttgtttagtatgcgcgaggatttcgcggtcgttcggtttttttcgttcgttttgttttacggggcgttttttttatttttttcggttaacgttttgggtaattacgtttttgttatttagaatt

SEQ ID NO: 182 - DNA, 2382 bp, Artificial Sequence
  chemically treated genomic DNA (Homo sapiens)
ttaatttatggttatttgtttgttatagcgaatttttttttaggaaagaatttgttttttgtaaagaggatgtgtaatgttggaaagttcgtttttttttttattagttggattttgagagttgggagagatgattaatgaataggttgagggtgttatagttttgttattttgggatggggggtgtagtaggggagttatagtttttttagaggttaggttattttatttagttgtattttatttttaattttttagtgggcgatatttgtagggtgttgggattgggagaaattttagatattttaaattttaaattttattttttagatgaagatattgaggtttagagtgggttagtgagttgtttaaggttataggataggttagaatggaagtttttcgatttttttcggggcgttgggtttatagttttattttgttattttttgtttcggaagtgagtattgaagttatttaagagaggttagtgattaaaggtagcgatttttaggtgtagaggttggggtagacgtgtttatgagtttgttttttcgcgtatttttttttatttcgtttttatttttgttttggttattatgtgtttttattattttgagatttagagaggtgtagcggtttgtcgaaggttatatagtatattgagtagggttttcgtttttattgtttagttgtttttttttattgtttattcgggtttttgtaagtttgttaggattttcgggagtttgttttttttaatgtatagagtcgtggcgcgtgttaaagtgtgggaaagtttttgggagagggaaggggtagaaaatatagtcgtttattttaattttggacggttgcggtaaggtaggggcgtttagaaaggtagttagttttgcgtatcgttagtgttttcggtatattttattttgcgttaggggttttttagggtcgcgcgagtatgtttttttagtttttttttagcgaagtaggcgcggcggggttttacgcgtttagtatttattttttttcgtacgtttattttatgtattttttcgcgttttttttacggtttttttgcggcgagtcgtttttgttttttcgtaggttttcggttttagcgttaaggtatcgcggtttttttcgtttttttttcgcgttgaattcgggtttttcgcggggagaaataggttgggggcgaggggttttcgagataatttaggatattttttcggggtttagttaggtaatttcgacgtttatggattttcggattatagtttttatcgcgggtttagttttatttttagtttatttcgcggtgagcgttaagttttaaaagtcggagtgttatcgtttggtgatttcgcgttcgttcgcgttttaggttttggaggtggttattgtcggtttaggtacggtttcgttcgggattattggttgttttcgtggggtgtttcgtttggggtttttttttattttgggacgttttaggcgcgtttagtttgagttggtggagagggcgggggcgggggcggttggggtttcgaagtttaggtttttttttttattttttcgtcggttttgtcgttgcggttttcgttttcgcgttcgttcgttttcgagttttttttttttttttttttttttttttttttttttttgtagtagtaataatttgatttcgttttttttattcgttttttgagatgttttttatattcgtttgtatatagcgcgtgcggttttttcgaaggcgattttcgtaaatcgcgacgtaggtttttcgttttaggtaattttcgttgcgggagaggtcgttttttggcgtttacgttttttttttgtagttcgtattgtcggtcgagggggaaatgggcgataggggaaggggaggtgtgtgcgggacggattaggttggggtagaggggtttaaattggcgcggttttatagaagtttgaggagggcggggtcggtttcgagttttcggagttttacgggattttttcgattttattgaggagttttcgttagtttcgtgtatttttgtaatattttttattttattcgttagtttcgagtttatagtttttcgggttcggggattggttgggggaggggacgggggggaggggattttttggttgtagggaacggcgtgcgggcgggggtgggagggaaacgatttgttttaggagatagggatgaaggtttttttgagttaagggagggagaagagaggtggaataaaaggtagatgttggaggggaaggggagttggggagttcgtttcgagggtttcggtagttcgcggttttttgttttagtttgttttagagggtgaggttaaggttggtgttagggttttttatcggttatttgga

SEQ ID NO: 183 - DNA, 2382 bp, Artificial Sequence
  chemically treated genomic DNA (Homo sapiens)
tttaggtggtcggtgaagagttttggtattagttttgattttattttttgggatagattgaggtaggggatcgcgggttgtcggagttttcggggcgagttttttagtttttttttttttttagtatttgttttttgttttatttttttttttttttttttgatttaggaaaatttttatttttattttttgaagtaaatcgttttttttttattttcgttcgtacgtcgttttttatagttagggggttttttttttttcgtttttttttttagttaattttcggattcgagaggttgtaaattcggagttggcgggtggggtggggagtgttgtaggagtgtacggagttggcggggattttttagtagaatcgggggagtttcgtagggtttcgggggttcggagtcggtttcgttttttttaaatttttgtaggatcgcgttagtttaaatttttttgttttagtttagttcgtttcgtatatattttttttttttttgtcgtttatttttttttcggtcggtagtacggattgtagaaggggggcgtgggcgttaggaggcggtttttttcgtagcggggattgtttggggcggaggatttgcgtcgcggtttgcggggatcgttttcggaggggtcgtacgcgttgtgtgtaggcggatgtgaggagtattttaagaggcgggtgggggaagcgggattaggttgttattattgtagagagagagagaggaagagaagagagagagggagagattcgagagcgagcgagcgcgggagcgagggtcgtagcggtagggtcggcggggaagtgggaagagggatttggatttcgggattttagtcgttttcgttttcgttttttttattagtttaggttgaacgcgtttggaacgttttagggtaagagggaattttaggcggggtattttacgagggtagttagtagtttcgagcgaagtcgtgtttggatcgatagtggttatttttagggtttgaggcgcgggcggacgcggggttattaaacggtgatatttcgatttttggggtttggcgtttatcgcgggataaattaagagtaggattgagttcgcggtgggaattgtaattcggaaatttatgggcgtcggaattatttggttagatttcggggaggtgttttgaattatttcgggaatttttcgtttttaatttattttttttcgcggagagttcgggtttaacgcggagagaaggcgagagaagtcgcggtgttttagcgttgggatcggggatttgcggggaagtaaaggcgattcgtcgtagagaagtcgtgggaagggcgcggggaggtgtatgaagtgggcgtgcggagagaagtgggtgttgggcgcgtgggatttcgtcgcgtttgtttcgttgaggaggagttggaagaatatgttcgcgcgattttggggagtttttggcgtagagtggggtgtgtcggaggtattggcggtgcgtaggattggttgtttttttgagcgtttttgttttgtcgtagtcgtttaaggttgagatgagcggttgtattttttatttttttttttttttaggaatttttttatattttgatacgcgttacggttttgtgtattggaggaagtaggttttcggggattttggtaagtttgtagaggttcgggtgggtaatgggagggggtagttgggtagtggaaacgagggttttatttagtgtgttgtgtgattttcgataagtcgttgtatttttttgaattttaggatgatggaggtatatggtaattaagataggaatggggacgaggtgggggagggtgcgcgggggaataagtttatgggtacgtttgttttagtttttgtatttgggaatcgttgtttttggttattggttttttttaagtgattttagtgtttattttcggggtagggggtggtaaggtggagttgtgaatttagcgtttcggggagagtcggaaagtttttattttgatttgttttatgattttgggtaatttattgatttattttgggttttagtatttttatttggaaaatggggtttggaatttaaggtatttgaggttttttttagttttaatattttgtaggtgtcgtttattgaaaggttggggatggggtgtagttgggtagaatgatttggtttttgggaagattgtagtttttttattgtattttttattttaaagtagtagggttgtgatatttttagtttgtttattggttattttttttaatttttagaatttagttgatggggagaaaggcgggttttttagtattatatattttttttgtagagggtagatttttttttagggaaaggttcgttgtgatagatagatgattataggttaa

SEQ ID NO: 184 - DNA, 17220 bp, Artificial Sequence
  chemically treated genomic DNA (Homo sapiens)
tttattgtatattatttattttttaggttgttagcgtggtttttagttttttttaagttaaagatatattatttttttgtgaataagtgtgtgaatgtggttgtgtggtttatttttttgtatttaagtcggttttatttattcggtaggaaagttttcgttaggtattgaggagtgtttgttatttagtttgtgtatttaagtatggatgtatgtatatgaatgttttttgtgtttttaagtgattttttttatatttttaaatgggttattgtttttggaacgtatttatagaaattttgttttagtttttagtttaataaagtttgggattttttttttagaatatcgttatatatttttgtatttgtatatttatgtttatattttttttggttagttttttattttttatgtattttttgttttatttgggtaacggagtttaagtgttttgatttgttttagtatatgttatttaagcgtatattttaatttgagtattcgtattatttttattttttttgttttgtttataatgtggtttttttttaggttagattaatatgggtttgtagtttaaatgtaaatagaggattttttaagattataaatttttaaagaaaggaagaggagggaggaggagattggaatgttagtaatgagttatttatgtatagggtaatttattcgtttattttaagttgaagaaagaattagataaatgtttgtagaggtgtattaaaattttagattaatttaatattagttatatatatatatatataaacgatggattttataatatattagtgtttagtttttttttggaggttgtttttttgtatatatttaattttttataagtttttggttaaaagtatgtttatttatatagagataatttaaagatcgttttgttttttttagtgtatatttgtatatgttggcggggtattttaggtttaggtttttggtttgtagtagttatagttagaggttttattcgattatagttatgtgtagattttttcgtttttgaatattcgtatgaattttttttgggaatattgagtttacgtttgttttttaaatttagtttttaaagtgagggtgtttattgtgtgtgtttatagtttttcgattgagaaatatttggttaaattagattatttagtagttgcgtttggtttgtggaagaatcgagttcgatgtattaagatgtgatcgtgtatatataagagaaaggaaaattttaggtttagatttatagtttttttttattgcgagttattttgtttttaggaatttttattaggttttttgtttttttttttttattatattattttattacggtttttaaagggttaagagaaatttttacggttttttttttatttagttcgttgggttcggaggttagttcgtttattcgtagtttatagagtttgttgttattttcgcgttttttttttttttagttttttagtcgggagggagtttgtatgtttgtttagatcgatttattatcggtatattaataatattcgcgagagcgcggagattttgtttaggtttttcggttcgtacggtttacggcggatagaattcggggagcgtgacggtgtttgcggggtgggggtagggggtttataggtattggtcgtttcgagcgtattacgggttttttttagtttcggtttttcgcgtttttattagttcggttgtcggggtatagttatagtttcgcgcgttgggtagttttatttttattttgtttaattttaaattgggcggggagtataggcgtcgtgtttagagaataagagataggcgcgggaggcggggaggagtagttaggtagcgacgcgagcgggagcgagttaaagatatagtggaggcgatcgcgggtaggaagaaagagcgggttgcgcgggtttcgaggcgtcgtacgtaacgcgtcgtttcgcgaagttatattcgttttttcgtcgtttttcgttatcggtttttttttattttttagcggcgtttttcgtagtttggatagcgaggtttcggtttgtgtgggaggcggaggttaggacggttttgtaaagggttggagagaatcgttaatgagttgtgtagtttattgattcggagaatattttttaattaatttttagttatttattggtgatagcgttttaaaggatagcgttggggttagtcgagttttagtcgcgatttgtcggtcgggcgtttgttgtttaaaattcgcgcgtttttttaaatattttaaggtaattggtgtgcgtggcggtgtatattcgtatattgaaggttagtttcggattaaatttggatggtatattaattatcgttttttttttttatttcgttttacgcgttgaaattttgtttaaaataaatacgaaaattaatattgtaaaatttatattagataataggtcgagagaggagtgggtagggttaaggaacgagcgtattttttaagtgtttacgtataggaatttttgaggttgataattaaaatgttttttacgtaagtaattttgttggtaaaatcgaatttaatatttcgtaaggattgatttcggttcgcggtgttcgtttttagtgttataggaagtgttagatggttagaaatatttaagtttgtttgtatttattatttattattttttggggtgggttatttttttttagtttttatttttaggttattttaaggatttttttttaaaagattatttttagaattaaatattatattattttttttttagcgtttttttaaaacgaaaaaagggggggaaaatatagttaaaatttcgagttgtttagtttagacgtagcgaggttgtgcgaatatttatttgaagcgcgttggtttttttttaaggtttgtttttaaatatatataattttttttttttttttttcgtttttttattttttttatttttattttttagacgtcggcggcgcgcgttttggcgcgcgggtatttatagtttttagttggagatcgcggattttttggaaaagatttattaatagtaaattacgtttcgttcggttacggtttatacgttgttagattcgttcgttttcgggatttcgggaagggtttattcgagcgtgcgagcggcgggaagttcgtcgggattacgcgtgatttcggtcgttttattttatatacggtgttttaaggtttttttcgtaaatagtaggcgttcgttatcgtcgtcgcgagttttcgagttggcggaggttttgcggcgtagtcgttcgtcggtttcgagcgcgggtttcgcggcgtttcgtttttttcgttttggtcgaggattttgtttcggtgcgtaagttttttttcgtttatagtttttttgttatacgtttttcgagtgggattaatttttttcggtcgtagatttttatacgtttattagggttatttattagattttttattgtttagcggagggtttaggtttcgttcgttttcgttttttttttacgacgttgttttcgtataagtatattttatatttatttttgggggtttataatttaaaatttacgttgaatatcggggagggagaggagggggaaagcgggagggggatcgtagattataattttaaaagaatatttataaaataaagcgtttgatttggttggcgggcgggttaagtcggaattttttgttttgttcgattttttagtagtttttttttttaatttacgtgattcgtgttttggggtaagttaagaaaaaacgggatttttttttcgagttgcgcggtagcggcggtaggtcgagttcggttcggttcgaggtattcgttatatattttcgcgtacgtatacgtcgacgttttatttggaggaacgatcggttttcggagaggcgagacgaggcggcggtggcggcggttgggggtttttatagttttttttcgagtcgaaaaagaaagtagacggtaattcgttgtttttttttttttgttcgcgagttaacgtcgaatttagttttttagtttttagtttatttttttttttttcgttcgattcgcggcgtttagcggcgatcgcgttttcgcgtatagatatatataggttgtaaatttttattttgcgaattttttgttttttttttggtttatcgggaggcgttaggtttttagtcgcgttttttttttttttggtgtttacgcggggtcgtttaggttggttgtattttaaataatatagttatgaaataaaaacgaaagcgagttaagtagttaaagggaagcgcgaggtaaaagtttcgcggggtacgttgcgggagggggtttcgggagagggggtcgattgtagtttttagcgcgttcgttcgtttattcgttcgcggtttttcgggggaaaggtgtttcgggtattgatttgaaattttcggtgggggagtaggtagggagtttgcgattcggttttttgaagtttttttttaagcggattcgaggcggcgagaaggagcggggggcggttgggtgggtggagagagatatgaggggtggggggggttggcgacgttaacgagcggagaaggagtcgggtcggagaagcgcggcgagtagtaaagtttgcggttttcggttgttcgtagttcgttcgcggcgtcgcgtttattcgattttttcgtcgtttgttggtagtcggttgttttcggggtcggtttcgtcgaggggtgggttttgggtcgggtgggggcggggcggggcgggttcggggttttcgggtaggtggcgatagtttcgtgcgatttttcgggttttcgtagttggattgggtttggtcgagtttagtagttttcgcgttgtcgtcgtcgttcgcgttcgggtaggagttttagcgttatgttgacggttcgtcgcgagcgttcgttcgggttgggtgtgtgtgagtgtgtgtgagtgttggttaagtcgtttttgcgcggcgatagcgcggtttgggtttttcgttcggcggttcgcgggtttttttttcgtcgtcgtcgttcgtttagttttcgttttcggtcgcggtttgggtttttgcgcgtttttttcgtagtcgtcgagttcggttcgcgtttagcgaggagcgtagttttgttttattttgtcgttgggagtttaggtttcgtttgtcgtcgtacgtcgcgattttaacgcgttttttttttttggtttttttttttttttttttttttttttttcgttcgttttttttttcgttcgttttattttttttttttttaatagtcgtttttttttttttcgtaggcgtagcgttcgggcgatagtcgttcgttcgtcgtcgtttttagttttcgtaagtttgagtttcgttagttttcgtttatttttcgttgcggcgttttcgcggcggggtttcgggaggggtgattttttaggaaaggtttgttcgagttttttcggtcgttatcgatgtacggttcggtacgttttggtttttttggattcgaatttcggattatttgggtggcgtttttttttttcgtttttcggttttttttttttagttcgggtcgagttggttgcgtacgttcgattcgggcgtacgttttgggcgagtcggagatcgatttgggcggcggcggcggcgagggttgtcggtagagttagagtcgaagggatgggggcggcgggggcggtttttttagtcgcgcgtcgagatttttttcgttatttagaaggttagtggaggatcgtaattattataaagcgtttcgtatttcgtttagttaaagttgttaaattttagcggtagtagtcgttgtcgtcgttttttgttattagcgttgcgttttttcggtttcgtttttttcgagatttagcggagcgtggtttgtgtgttttcgtgtttatttttattttagtttgttttttttttttagaggagtttttttttatttcggtgttaaaagttatttgaaaatattattttaggtaacggtggtcgtttcgtttgaatttcgcgttcgagtttttcggacgttttaattgtgtgggaattgtttggaggtgggggaaggggggagtagttcgtggaggtatcgggaggcgtgtggggggcggtcggcgagcggagattcgtttgtatttttttcggttttcgagtatttttacggtttgtatttttgatggttggaggggttgtttaggtttttcgtttcggcgttgggagattatttttcgcgttttattttttttgatagggagtaatttttggtttatatcgttcgttttataaatttttattcggtaacgtcgtgttgatcggtgtttggcggcggcgtatagtttgcgttcgtagtagtttaatttaattgatacgtattgagtttttttagcgtattcggcgcggttttgggcgcggggggagggcgggggtaggcgggagggagggggaagcggagaagcgaggtttcggttttttcggagcgtaaagttttaagggcgagtcgagaagttttagttggtgaagttggcgggaaggggtaggagtgggggagggggtatttcggattaatcgcgtttagattgcgggttcggatttcgcggttaatggtgattttattcggttgtttattagggtttttttatattgggaagggggtggggtgtttttttttgtttaaggataagatggtgtaggttttatgaaatataaatttgaaatggaggtggtttgtaaatttatacggaaagtttttaaaatattttggagtgtttttatgttaaaaataattaaaagtattttaagttgattattaagttaaggttaaggttaaaattagttttagttagtagatatttttttttttaaaaattagatttattattgattgtgggattggtattaggtgcgattttatttattttgttttagtttttagtatatagttataaaaatagttttttttaaagtagaagtgaaatatttttatcgtttgaaattcgaaatttcggtagaattaaatttttatgttttagagttgtttataataattgatgtaaaagataggcgagtaagtgttttcgcgagtagtgtttagttaggttgggtcgcgaacgtttttaggattagcgtttgtagaatggaatgtacgtttttttttttttggtttttttgggggtggatatttttgtaagttaatttatatatttttttaattttcggtaataagtagaaagatatttggattattatgttgtaaaattattttttataaagatattttaggattagatattaaaagttattagattgaacgtatgcgagttatagatatagttggagaaaaggtttttggttgtgtgttgtggtaatatttttttttgaagcgattttttttatttaaaataagttaaaaataatcgggaaggttgaagttgggtatttgtggggaaattttgaacgtggttttaggcgaggaggtcgttttgttgttgtaggttggacgggagaattggtttgggttagtgtggagtcgtgttaggttttttcggttcggttaggtcgaatcgtagaggttttggttcggcgtttagttattttttatttttttttttcgtttttttaattttgtttttaggtataggtttttttcggagttcgaagtcgtatgtaaacgtttagaatttttagaaaatttaggaatcgagttcggggtttgtagttttttagagttttacggtttttcggggttgttgataaagaggtttgtttgtttaattttaaaagttttagaattcgggaggttgagttaggagaatcgtttgaattcgggaggcggaggttgcggtgagtcgagatcgcgtcgttgtattttagtttgggtaataagagcgaaatttcgttttaaaaaaaaaaaaagaaaagaaaaagaaaaaaaaaagttttagagttaaaatgaataggggtggtgggggtgttgtaaatgcgaaggggtcgaggggagggttgattgggggagaaatttgatgttggagataaataggttagtaaattcgtttttgacgtaatttgtaatatttttttttattttttttagggattttgtttttacggtaggttggtaggattaaagggttttttttttattttttagggatatattttttaatttcgtgggattttaaaaatattttattaagggagttttaagaggtatgagtggtgggggggattcgtgatttattgggaattaaaatgtgggattttttcgaggcgttataaggtagagggggggaggggagattatatttattggttcggttagttttaattgttttggggaaaataagtagaaagttgtcgaagggtaattttattttgtgtttttatttaagaaggggtttagggagttggggatgtcgcggggtttgtaatgggtgtcggcggtttggttttttttttgttttttttttttttgtttttttataagtttttcgggagttgattcgggggttaggttgttatatttagtatttagtaaggggaggattttaatgaaaatagaggaggaggagagagtgagtaaaggagtgtatgggaggggaggtcgtgtagtttacggagaaataaagaaataggtgtcgaaatgagaggtgttgcggatggagtagcgggggttgttttttcgttattaatttttttttttatggaagtgttttttgattataataaattattcgattttaggttaattaggttttgtaattgggtaatcgagttggtttttttaggagtaggttttgagtttggttgttttttttaaggtaggttgattttgtaagattcgttagggttttttttatatatttttagttttattttggtttaggggaaaggttaggtattttgtgtttggggggattttggttttttaattttgtgtgtaagatttatttataacgtatattaggatttatattataaagtttataacgtatgtgtaggttttcgatggtttttttcggaggttgtttttagggcgatgatatttggtattggaataggtgggattcggatgagtatagataatgtatttttatataatgtgaggtagtttttttttaaaaatatatttatatttatagttttttggttattttgtataagaattttgggtttatttaatggtattttaaaaaatattcgttgttttattttttaagtataaggtatagttggttttttttttgaaatttaaacgaggtaataaataggaggcgtattttttttttaggattttatttatttggaaatatttaaaggtagttgttttttagggtagaagattgttggatttaagggtcgttaggttgaatatgattgtttttttttttttttagtttttggagggttattgggtgtttggggaaggaaggttttaagggtagttttttcgtggtttttagtaattattttggaatttttggtttgggttcgatttgggttaggttttgagtttttcgaatataggtacgtgtgggtgaattggtatttatattacgggggttcgtagggtggttgggtgtcgattaaatgggtataatataggaggtttttgggaggttggtcgttttttgcgttcggtaagggtttaagagttttcgacgtcgtcgcgttgggtcgggtgtttttgtagataaattcggacgttacgtttcgtttcggttgtttatttagtaaggcgttttttgcgtatattttattcggttgggggtagtgagtgggaatcgtcgggagagggggcggggaattattaattattcgttttcggatttagtgtgtcggttttcggttttagttattttgtatttagttttttttttttatttttatcgggtttttgcgaagacgtattatttcgaattttttcgcggtattattttcgaattggaggggtagagaaggttttgttagtttttcgtttgtagtaggaaggtgggtacggattagtagaagggaaagcggtgttgatttgtttttaaatatttttgttttttcgtttttaataaagtcggttatagaggtgagtggcgcgggatggttgtttcgagaaggtcgtagttaggagtaaagttttggggtttataacggattgggtattttaaacggtgtaattttcggtatattttattcgtttttattttatttttcgaattattttgttttcggtgtttatttttttttttatatttgcgtttttagcgcgttagtagtcgcgtagttttcggttttgagtgcggggggtggggtgggggggtttagggtggtttgtgtggtgcggtttgatagaattttttgtgtgcggcggagggaggaggttaatgtataatgtatagcgtttggaagttcggttattagcggtttgtcggtgatatagataaacgattgagagggaggagatttagttcgttttggagtttaaatagattagcgtggaggggaaacgttatgatttaaaagtgtgtgtttgtagatattcgtatatattttaatgatttttagtaggttatgtgttttagttttgtatttttttttttttaaaaggaggatgtgtttagaggagggaggatgaaggtagagtgagaggttttaatttagatttattagtagtttttgagagatgaaggaggggagaagtttagaaagcgaggtttggggaagttatacgatttaaggttaagtttagattttgtttttaaaataataatttaaaaaaagagttatttagttttttattttggattatattttgtgttgtattagaaaggtttgggggaaagaataaattttgttatttttgtttttttcgggagtttatatttttgaattttttttttttattgatattttagagattttttttttttcggtttaatatattagtgttttttagtaattaaggcgagaagggggtggggataaagataagttaattttttttttcgttatgtaagtgtgagagataagataacgttaagttggggtaaagcggttgtttataatttttttttagcgattttgatcggttattttttatttcgtaaaaatgtttttttcgaaaattggattaaaaaagaaaaagagaaaaagaaaagaaagaaagatttttatttggaagtgatatttaaaatttattttttttttattgataatttattttttattggcggggttttttaggaaaagtcgtatttcgattgtaggattttaggttttttcgcggggggtaggattattagtgtaattaggttgaataaaattagggatgcgtgatgaggatttattttgtatttaatttaagttcgcggttgggtttttttttttttagttattggtcgatgtttgtgtttcgttatcgtatttagtgtttttaaattaaataggtagttatatttgggagggttatataattatgttaatatgaagtggttgttaatgcgaaataagaagaaatttttttgatatttataggtttttataaagggagagaaaggaaattatattttttagaattcgaaagtttttagtcgaatcggattttcggggagttttagaaattttttttttcgtataggaatttcgcgaaggggttttcggaagattttgtcgaggaaggttttggtattagattttacgattttagagcgttttgtaaatttttttcggtttagtggttagttttagaatgtaaattttaaggcgggcgttttagattaagttgatttagtttttgtttatttttagtttataatttcgaggtttttattttttgttttcgatcgggtcggtatcgtggcgttcggtatatgttaagtttatcgtttttaagttaggttgtaagatttaaaggttggggtttgtcgcggacggattgtttttggggagttgaaatcgtttagcggggaaattttttttttcgttttttttcgaaaagtttggtcgcggtttaagtttcgagtaagcgggtattcgttgatagtcgggttttacgtaaggtttatacgcgttttattagttagttcgagtttttttcgggcgagtcgtttggcgcggttttaaggtcgggtttaggcggggagagggtgcggggtcgtagcgagttgcgggcggaggtgcgggtttcgcggagttcggttaggttcggtttcgcgtttttgggttcgcgggtaagttgagtcggcggggtaggtcgttttttggttggcgtcggggcgttaagttgcgttttacgtgttcgttatattagtagtagcggcggcggcggcgaggagggggtgttgggaggcgcgcggtcgttttcgcggggttttcggatttcgttttttcgttttttttcgtgggggttgggtcgagattattttgcggtttttattttagcgtaagtcgaaagcggcgttgttagacgtagagaggtttttggggcgtcgtttcgagagtcgcgcggcggtagtagttaggggagggtgtttttcgcggtcgtttcgtcgtcgtcgtcgtagttacggggatcggaagttttcgcgtcgtttcgagcggttttcgttggttttagggttgttttagacgagggttggtcgcgcgttatttttgattttttttcgttttaggcgattattcgggttttgcggtatttcggtgtaagtcgagaggattttttttgcggttcgatgagatgtttttgtttttttgttattattataagtacgttttttcgtatcgttcgtagtttcgtagttgggatcggaggggcgcggagtcgttatttcggtcgggtaggaatatttgtttttaggttttgtagttgggcgcgtgttgttgtgagaggttgtttattgttgtgtgtagagatcgcggaggagaaaatagggtttcgaagtttagggttaggagtagttaagtttcggttatttttattttttatttattgtaggcgatagagcgcgaagttagagggtttgttgggggttcgggttttttttcgaaggtcgaagggtcgttatttttgggattcggtttttggtttgaagaggtcgtttataaaatagatggggtaaaatttgttttgggagtttttttagtgttcgttttcgttttttaaattagatatatttattttttttttagttttattttagttttcggcgggggacgggagtaggttatggcggtatcggtattttattcgtttttttttacgtagggacgtagggtcggttgcggggttcggattttgttattttatttagggaagggttaatggacgtttttcgtttttttcgtgttcggaggagattcggcggcggagttgatttgtaaggtttgttttgttttatttattttttattttcgttttatttttttcgatttttttggtttagggttcggttcgggaaggcgttgttttgttagcgggagtcgagcgagtgtatagagaaaagtttttttattttaatgagagtgtatatagcgttgtagcgaggaggatgattattcggcgggcggggggcgcgggttcgggtcgcgggcggcgtgtgcggcggtttcgcgggttcggagttttcgtttgtttggttgttaatcgtacgttttttgttgttacggaggtaggcgggagtcggcggtcgagtttagcgtcgacgattcggcgggtgatacggaaatatggcgtagcgtttttttttcgttcgcgttttcgtttttcgtttttttcgcgttttcgtttttcgtttcgtattttttttcgttcgcgcggtttttgtagttttaatgttttgttttcggtttggtattattacgttagtagtcgttttttcgcggtttcgcgcgttttttttttttttgttttcggggtttatagaaaacgtttgtttttgtttcgagttttcgttaaattaaatttgtggtggtaacggaaggcggtgtaggcggggaggggttcggggattttggtagtagtcggttagagcgtggtggaaatttttttcgttgggtttttcgtttttttttattttttttttttaatatagagtcgtcggtttttcgacgttttttttttcgttttcgagaggttttagtgttttaggaaggtttgggttatagagattgtgattaggggtgaagaatttagagtgcgtgtttgtgagtttcgaggttttggtattcgatgattttgttttttgtagtttcgatttatttttttttttttggttattcggggttttgtattagtcggtgaagaaggggagggaagagaaagtgtttttttcgtgcgtgtggtttttattttaaggatttgttggaatttgttatttttaattgtatagttttttttcgtataggatttagggcgaaagcggggaaacgtcggatttagggggaaagggtcgggttagaaatttagttttggaggttggatcgtatttttttggcgggtttagttatatttggtcggtacgcggggcggggcgatttagtagagtgggggacgtaagggttaggtttttcggtttaggagacgttaaacgttttaattttggagcgagagagtaggaattttcgtttttatttaagcgcgcgcgttttttagttcgacgcgtaagtcgtggtttttcgcgttagagttgtttaggcggtaattttttaagtttgtaattaagcgaggcgtcgtcgtgttttttgttagtgtcggttttgttagtcgtatatggttttggtgtttcggttcgaggtttcgcgattagttataggttcgtttcgttttttttttaattcgtttttgtaggtagtttggggacgcggtcgatttggcggcgttggtagggagttattgttcgcggggcgggttttttgattagtgttagtttcgttgcgttcgagtcggcgcgggttttggggtgcgggtttggcgtttttttttttttatagttttttggttggggtggcggcgtttttttttttttcgtttttttttcgggtttgcgagatttatttgtgtggtgttatttgtataaaaataggataagtgtttttgtgcgtttatacgcgggaggcgaaatttttattgatgtgtttgtgtggagttttcgattgtcggagcggtttgatttagggtgtttgtgttgttttttataagaaaggagagaaagttttttttaattttttcggcggtttgggtttttagaagtatgtttttttgcgcggtcggaatggtttattatttgggttttaagcgcgtcggatttatagcgagtaggttgagggttaggcgggaggtttattatgatttataaaatcgggcggtttaatcgttagttgttaatttatttatatgtggagttttttaatgtttttttcgttcgggttcggttttttgagggtttgtttcgatatagttagagtcgttaagtgggagttaatttagtggtttttttttttcgtcggtagcgtggtttttttttttcggcgattttcgtttttttggtttattgcgttgttcgttagtaattttttagtttggataaatagttgggagggcgtcggtcgcgcggagttagtaaattaattattaatttttaagcgaggtttggattaggggagggagcggcggttagagtcgagttcgcgaggcgagcgtaaagtttttatcggggttaggagttatttacgcgttaacgaatcgggtgcgtgaaggcgggtttcgttatggtttttcgggtttttttagaagttttcgttcgtcgggttttttaagttcgtattttgtttggttaggtaggtcgcgttatagcgttgtttttgggagagtttgaatattaacgagtcgtttcgggttttagcggtttgttttttataggagagcgtttcgcgtttgggtaagtttttcggattcggtcgggttttttttggtttaggtttgttaaattaaattgatcgtattttgtatcgattaatttttttgcggtattttttttttttagtttacggtggagtcggtacgtagggggttaaaagtttcggttcgttttggtttttcggttgcgaggagaaaacgttgattaaagtgtttaaggggaaggtaatatatgtatattcggtttcgggtcgaaggaggtcgattggagacggttttcgagttattcgtttcgattcgttttttatattttcgggaacgcggcggcggcggcggttttggttcgtacgattcgttcggcggagcgttgcgttgttgggttgggagggcggcggggaggaggagagacgagggggcgggaggcgaattcgggttgcgcgttaagaggttcggagtcgtagattagttatcgttcggttttgcgttttcgggtgcgttcgggaatcgggagggtaggcgtcggtttcgtttagtcgggtttttcggttttcggcgcgggtgtttttatttttattttcgcgcgtttttggcgcggttggttcgattttcggggattcgcgtagtcgagatttatttgttaggttaagggtaggatagaaattttgtaagcggagttttgtttgcgaataggaaatttttttttgatgaggtgttgttttttttttacgtcgggttttaaaataaaattttagagcgggcggttaggtatttagtttcgttcgttatggtcggcgattttcgtttttcggtttcggtttcgggcggcggagttaagttaatagagtcggcggacggattcggcgtcggtttcgcggagggcgttaggttgttatttttcggggttcggacggggtcggcgggggtgcggagtttcggagttttcgcgtttttttaggttttatagttatcgagcggttttgcggagttgttcgaggtcgtcgggttagcggtttttcggagggcgtggggggcggggaggtcgcgcggcgtcgtcgattcggcgaatttcgttgcgggagttcgggagggttgcgagttcggtttggtaaagtttttgtggaaattttatgttttgaaatttttgcggcgtcgtagaaggagggggagaggggagcgcgggaagcgcgcgggggcggtttgtattcgttttttttcgtcggggagtgggtttcgcggtttttcgggttttatgggaaagttggagggcggggacggtcgggttttcgggttcg

SEQ ID NO: 185 - DNA, 17220 bp, Artificial Sequence
  chemically treated genomic DNA (Homo sapiens)
cgggttcggggattcggtcgttttcgttttttagtttttttatgaggttcggggggtcgcggaatttatttttcggcggggagaggcgggtgtagatcgttttcgcgcgtttttcgcgtttttttttttttttttttttgcgacgtcgtaggagttttaaaatatggagtttttataggaattttgttaggtcgagttcgtagttttttcgggttttcgtagcgggattcgtcgagtcggcggcgtcgcgcggttttttcgttttttacgtttttcggggagtcgttgattcggcggtttcgggtagtttcgtaaaatcgttcggtggttgtagaatttggggaggcgcgggggtttcggggtttcgtattttcgtcgatttcgttcgggtttcggagggtggtagtttggcgtttttcgcggggtcggcgtcgagttcgttcgtcggttttgttggtttggtttcgtcgttcggggtcggggtcgaggagcggaggtcgtcggttatggcgagcgaggttgggtatttggtcgttcgttttggagttttgttttgaagttcggcgtgggggaggggtagtattttattaaggagaaattttttgttcgtaagtaagatttcgtttgtagagtttttgttttgtttttgatttgataagtggatttcggttgcgcgggttttcgagagtcgagttagtcgcgttaggagcgcgcgggggtgggggtgggggtattcgcgtcgaggatcggggagttcggttgagcggggtcgacgtttgttttttcggttttcgggcgtattcgggagcgtagagtcgagcggtgattaatttgcggtttcgggttttttggcgcgtagttcgggttcgtttttcgttttttcgttttttttttttttcgtcgtttttttagtttagtagcgtagcgtttcgtcgagcgaatcgtgcgggttagggtcgtcgtcgtcgtcgcgttttcgggagtgtgggaagcgggtcgaggcgggtggttcgggagtcgtttttagtcggtttttttcgattcgggatcgaatgtgtatgtgttattttttttttaagtattttgattagcgtttttttttcgtagtcgaggagttagagcgaatcggggtttttaattttttgcgtgtcggttttatcgtgggttgagggaagagggtgtcgtagggagattggtcgatatagggtgcgattagtttggtttagtaagtttgagttaggaggagttcggtcggattcgaggagtttgtttaagcgcgggacgtttttttgtggagagtaggtcgttgaggttcgaggcgattcgttaatgtttaagtttttttaggggtagcgttgtaacgcgatttgtttggttaggtaaggtgcgggtttgaaaggttcggcgggcggaggtttttggaggggttcgggaggttatggcgggattcgtttttacgtattcggttcgttggcgcgtgggtggtttttaatttcggtggaggttttgcgttcgtttcgcggattcggttttggtcgtcgtttttttttttggtttaggtttcgtttgggagttaatgattgatttattggtttcgcgcggtcggcgtttttttagttatttgtttaagttgaggagttgttggcgagtagcgtagtaggttaagagagcgggggtcgtcggggaagggaagttacgttgtcgacgggaaggagaggttattagattagtttttatttggcggttttagttgtgtcggggtaaatttttaggaagtcgggttcgggcgaagggagtattgggaagttttatatgtaaatgggttggtagttggcgattaggtcgttcgattttatgagttataatgggtttttcgtttggtttttaatttgttcgttgtggattcggcgcgtttggggtttaagtggtggattatttcggtcgcgtagagggatatgtttttgggggtttaggtcgtcgaaggagttgagaaggattttttttttttttttgtagaaggtaatataaatattttaaattaaatcgtttcgataatcgaaggttttatatagatatattaataaggatttcgtttttcgcgtatgaacgtatagaaatatttgttttatttttatgtaaatgatattatataaatagatttcgtaggttcgggagaggggcgggaggaggaggggcgtcgttattttagttagggggttgtgagaggggaggggcgttaaattcgtattttagggttcgcgtcggttcgggcgtagcggggttggtattggttaggaggttcgtttcgcgggtagtggttttttgttagcgtcgttaagtcggtcgcgtttttaggttgtttgtagaggcggattagggaaggagcgaagcgagtttgtgattaatcgcggggtttcggatcggagtattaaggttatgtgcgattgataggatcgatattagtagaggatacggcgacgtttcgtttaattgtaggtttaaaaaattgtcgtttgagtagttttggcgcggagagttacggtttgcgcgtcgagttagggagcgcgcgcgtttgggtgggggcgggggtttttgttttttcgttttaaggttggaacgtttggcgttttttggatcgagggatttggtttttgcgttttttattttgttgggtcgtttcgtttcgcgtgtcgattaagtgtggttgagttcgttaggagagtacgatttagtttttagggttaggtttttgattcgattttttttttttaaattcgacgttttttcgttttcgttttagattttatacgggagggggttgtgtagttgggggtgatagattttaataaatttttaaaataaaaattatacgtacgaaagaaatatttttttttttttttttttttttatcgattgatataaagtttcgaatgattaaagggaaagaggtaagtcggggttgtagggagtaaggttatcgagtgttaaaatttcggggtttatagatacgtattttgagttttttatttttggttatagtttttgtggtttagatttttttggagtattggggtttttcgggggcgaagggagaagcgtcgggaggtcggcggttttgtgttggggagggggagtgggagggagcggagaatttagcgagagaagtttttattacgttttggtcggttattgttaaaattttcggattttttttcgtttgtatcgtttttcgttgttattataagtttggtttaacgagagttcgggataaaagtaaacgttttttatagatttcgaaaataaaggggaaagagacgcgcggggtcgcggagaagcggttgttagcgtaatggtgttaggtcgaaagtagagtattaaaattgtaaaagtcgcgcgggcgggaggaagtgcgaggcgggaggcgggagcgcggggagggcgggaggcgggagcgcgggcgggggaggggcgttgcgttatgttttcgtgttattcgtcgagtcgtcggcgttgggttcggtcgtcggttttcgtttgttttcgtaatagtagaaagcgtgcgattagtagttagataggcggggatttcgggttcgcggggtcgtcgtatacgtcgttcgcggttcgagttcgcgtttttcgttcgtcgggtaattatttttttcgttgtagcgttgtgtgtatttttattagagtagggaggtttttttttgtgtattcgttcggttttcgttggtaaaataacgttttttcgggtcgggttttgggttaggagagtcggggagggtgggacggaggtggggggtgggtgaggtagggtaagttttgtaggttagtttcgtcgtcggatttttttcggatacggaggagacggggagcgtttattggtttttttttaggtggagtggtaaagttcgagtttcgtagtcgattttacgtttttacgtggaggggggcgggtggagtatcggtgtcgttatgatttattttcgtttttcgtcggaggttagagtagggttgagggggagatgagtgtgtttggtttggagagcgggggcggatattgggaaggtttttaaaataggttttgttttatttgttttatgaacgatttttttaggttagaagtcggattttaggggtggcggtttttcgattttcgaaaggagattcgggtttttagtaggttttttggtttcgcgttttgtcgtttgtagtgggtgggagatgggggtggtcgaggtttggttgtttttggttttgagtttcggagttttattttttttttcgcgatttttgtatataatagtaggtagttttttatagtagtacgcgtttagttgtagggtttgggagtaggtgtttttgttcggtcggagtggcggtttcgcgttttttcggttttagttgcggagttgcgagcggtgcgggggggcgtgtttatggtggtagtagagggatagggatattttatcggatcgtaggaagggttttttcggtttatatcgggatatcgtagggttcgggtggtcgtttggggcgaggagggattaggggtgacgcgcggttagttttcgtttggaatagttttggggttagcggaggtcgttcggggcggcgcgagggttttcggttttcgtgattgcggcggcggcggcggggcggtcgcgaggagtatttttttttggttgttgtcgtcgcgcggttttcggaacggcgttttaggagtttttttgcgtttggtagcgtcgttttcggtttgcgttgggatgggggtcgtagggtggtttcggtttagtttttacggggaggggcggggaggcggggttcggagatttcgcgggaacggtcgcgcgttttttagtatttttttttcgtcgtcgtcgtcgttgttgttgatatggcgggtacgtgaagcgtagtttggcgtttcggcgttagttagggagcggtttgtttcgtcgatttagtttattcgcgggtttaggaacgcggaatcgagtttggtcgggtttcgcggagttcgtattttcgttcgtagttcgttgcggtttcgtatttttttttcgtttgagttcggttttggggtcgcgttaggcggttcgttcgaggggaattcgggttgattaatgggacgcgtgtgggttttacgtgaggttcggttgttagcggatattcgtttgttcggagtttagatcgcggttaagtttttcggggaagggcgagaggaggggttttttcgttgggcggttttagttttttagggataattcgttcgcggtaggttttaatttttggattttgtagtttggtttggagacggtagatttggtatgtgtcggacgttacggtgtcgattcggtcgggggtagggggtgggagtttcggggttgtgagttgggggtgggtagaggttaggttagtttggtttggggcgttcgttttgaggtttgtattttggggttagttattgggtcggggggaatttgtagggcgttttgaggtcgtggagtttgatattaaaatttttttcgataaagtttttcggaaattttttcgcgaaatttttgtgcggaaagaaggatttttaaaatttttcgagggttcggttcggttgggagttttcgggttttagggagtgtgattttttttttttttttttataggggtttataaatattagaagagtttttttttatttcgtattaataattattttatgttgatatagttatatgatttttttaagtataattatttgtttagtttgaaggtattgagtgcgatggcgaaatataaatatcgattagtaattaagagaaggaaaatttagtcgcgagtttgggttggatataggataaatttttattacgtatttttggttttatttagtttaattgtattagtaattttgtttttcgcgagaaagtttgaaattttgtagtcgaggtgcgattttttttggggagtttcgttaatggggggtgggttgttagtggaggggaggtgggttttaaatgttatttttaaatgaaaatttttttttttttttttttttttttttttttttttgatttagttttcgaaaagagtatttttgcgagataagaagtgatcgattaaaatcgttaaggggaggttgtaagtagtcgttttgttttagtttagcgttattttattttttatatttgtatggcggaaaaaaaaattggtttatttttatttttatttttttttcgttttaattgttaaaaaatattagtgtgttaaatcgggaggaaggaggtttttggagtgttagtggaaaaggaagatttaaaaatgtgggttttcgggggaagtaagggtggtagaatttatttttttttttaggtttttttggtataatatagggtgtagtttagggtggaaggttgggtggttttttttttaaattattattttaagaataaaatttgggtttggttttgggtcgtgtggtttttttaggtttcgttttttgaatttttttttttttttattttttaaaagttgttggtgggtttgggttgaggttttttattttgtttttatttttttttttttagatatattttttttttggggagggggggatgtaaggttaggatatatagtttgttggaaattattaaaatatatgcgagtgtttgtaaatatatatttttaaattatggcgttttttttttacgttggtttatttaaattttagagcgagttggatttttttttttttagtcgtttgtttgtgttatcgataggtcgttaatggtcgggtttttaggcgttgtgtattatgtattagtttttttttttcgtcgtatatagaaggttttgttaggtcgtattatataaattattttgagtttttttattttatttttcgtatttagggtcgggggttgcgcggttgttaacgcgttgggaacgtaggtatggagaggaggatgagtatcgagagtagagtggttcggaaggtggaatgggagcgggtgaaatgtgtcgaagattatatcgtttggaatgtttagttcgttgtgagttttaaagttttgtttttggttgcgattttttcgaggtaattatttcgcgttatttatttttgtgatcgattttgttgggggcgggagggtagaggtatttagagatagattagtatcgtttttttttttgttggttcgtatttatttttttgttgtaggcgaggggttggtagagttttttttatttttttagttcgggagtggtatcgcgaaggggttcggggtggtgcgttttcgtagggattcggtgggagtggaggagggaagttggatataaaatggttggggtcggaggtcggtatattgggttcgaaggcgagtagttggtggtttttcgttttttttttcggcggtttttatttattgtttttagtcgggtaaaatatgcgtagaaggcgttttgttaaataagtagtcgaggcgggacgtggcgttcgggtttatttgtaggagtattcggtttagcgcggcggcgtcgagggtttttaagtttttgtcgagcgtaagaggcggttagttttttagaagttttttgtattatgtttatttggtcgatatttaattattttgcgggttttcgtagtgtagatgttagtttatttatacgtgtttgtgttcggggagtttagggtttgatttaaatcgagtttagattagaaattttaagatggttgttaggaattacggagaggttgtttttagggttttttttttttaaatatttaataattttttaaaggttaggaagaagaaagaatagttatgtttagtttggcgatttttaagtttagtagttttttgttttgggaggtagttatttttagatgtttttagatgagtgaaattttgggaggaggatgcgttttttgtttgttatttcgtttgagttttagaggggaagttagttgtgttttgtgtttggaggatggggtagcggatgttttttaaagtgttattggataagtttagagtttttgtataaagtgattagaagattataagtgtgggtgtgtttttaaagaaaggttattttatattatgtaaaaatatattatttgtatttattcgagttttatttgttttagtattaagtgttatcgttttgagaatagttttcgaggaggattatcggaagtttatatatacgttataagttttatgatgtggattttagtatacgttataaataaattttgtatataaggttagaaggttagggtttttttaaatataggatgtttggttttttttttaggttagggtggagttggaggtgtgtgggagaggttttagcgggttttgtagagttaatttgttttgagaagggtagttaggtttaaggtttgtttttagaagggttagttcgattgtttagttgtagggtttggttagtttgaggtcgagtggtttgttataattaggagatatttttatgggaagggagattggtggcggaggggtagttttcgttgttttattcgtagtattttttatttcggtatttatttttttattttttcgtgggttgtacggtttttttttttatgtatttttttgtttatttttttttttttttttgtttttattgaaattttttttttgttgagtgttgggtatagtagtttgattttcgggttagttttcgaagggtttgtgggagggtaggagaggagggggtaggagaagggttaaatcgtcggtatttattgtaggtttcgcggtatttttagttttttgagtttttttttaagtgaggatataagatgggattgtttttcgatagttttttgtttgttttttttagaataattggaattaatcgggttaataggtgtaattttttttttttttttttgttttatagcgtttcgggaaaattttatattttaatttttagtgagttacgaattttttttattatttatgttttttaggatttttttaataagatatttttgaaattttacggagttgaaaaatgtatttttaggagatggaggagaaattttttaattttattagtttatcgtggaggtaagatttttagaaaaggtgggggaggatgttgtaaattacgttaaaggcgaatttattggtttgtttgtttttagtattaaattttttttttagttagtttttttttcggttttttcgtatttatagtatttttattatttttgtttattttaattttaggattttttttttttttttttttttttttttttttttttgagacggagtttcgtttttgttgtttaggttggagtgtaacggcgcgatttcggtttatcgtaattttcgtttttcgggtttaagcgatttttttggtttagtttttcgaattttaggatttttaaagttagataaataggtttttttgttagtagtttcgggaggtcgtaagattttgagaggttgtaggtttcgagttcggtttttggattttttaaaagttttggacgtttatatgcgatttcgaatttcgagaaaagtttgtgtttgggggtagagttggggagacgaggggaggggatagaaggtggttgggcgtcgggttagggtttttgcggttcggtttaatcgagtcggaagagtttggtacggttttatattggtttaggttagttttttcgtttagtttgtagtagtagagcggttttttcgtttggaattacgtttagagtttttttataaatatttagttttagttttttcggttatttttgatttgttttgaataaaaggagtcgttttaaaaagaaatgttgttataatatataattagaggttttttttttagttgtgtttgtaattcgtatgcgtttaatttaataatttttaatgtttggttttaaaatgtttttataaaaaatagttttatagtataatagtttaggtgtttttttgtttgttatcggagattaaaaaaatgtgtgggttggtttgtagagatatttatttttagaaagattaggaagaaaaaagcgtgtattttattttgtaggcgttggttttggaagcgttcgcggtttagtttggttgggtattgttcgcgggggtatttgttcgtttgttttttgtattagttgttataagtagttttggagtatgaagatttaattttgtcgaagtttcgggttttaaacggtagagatgttttatttttgttttgagaagggttgtttttataattatgtgttgagaattaaaatagaatgaataaaatcgtatttaatattagttttatagttagtagtgagtttaatttttaaaagggaaaatatttgttagttagagttgattttggttttgattttgatttagtaattaatttgagatgtttttgattatttttggtatggggatattttaggatattttaaaaatttttcgtgtggatttataagttatttttattttagatttatgttttatggagtttgtattattttgtttttaggtagaaagagatattttattttttttttagtataaaaagattttagtgggtagtcgaatggggttattattggtcgcgaagttcgggttcgtagtttgggcgcggttagttcggaatatttttttttttatttttattttttttcgttagttttattaattagggtttttcggttcgtttttgaggttttgcgtttcggggaggtcggaatttcgttttttcgtttttttttttttttcgtttgttttcgtttttttttcgcgtttagagtcgcgtcgggtgcgttggagaagtttaatacgtgttaattgaattgaattgttgcgggcgtaggttgtacgtcgtcgttaagtatcgattagtacgacgttatcgagtggaaatttatggggcgaacggtgtaagttaaaagttgttttttgttaaggaaaataaaacgcgggagataattttttaacgtcggggcgaggggtttgggtagtttttttaattattagaggtatagatcgtgaaaatgttcgagaatcgggagaaatataggcggattttcgttcgtcgatcgttttttatacgtttttcggtgtttttacgggttgtttttttttttttttatttttaaataatttttatataattgaaacgttcggggaattcgggcgcggagtttaggcggaacggttatcgttgtttggggtggtgtttttaggtagtttttaatatcgaaatgggaaagggtttttttgggaggaaggggtaaattggggtgggggtgagtacgggagtatataggttacgtttcgttgggtttcggaggggacgaggtcgggagagcgtagcgttggtggtaagaggcggcggtagcggttgttgtcgttggggtttgatagttttggttgagcggagtgcgaggcgttttatggtaattgcggttttttattggttttttgggtagcgaggggagtttcggcgcgcggttgggagagtcgttttcgtcgtttttattttttcggttttggttttgtcggtagttttcgtcgtcgtcgtcgtttaagtcggttttcggttcgtttaggacgtgcgttcgggtcgggcgtgcgtagttaattcggttcgagttggggaggggaggtcgggggacgaggagggggggcgttatttaagtggttcggggttcggatttagagaggttaaaacgtgtcgggtcgtgtatcgatgacggtcggggaaattcgggtaaattttttttggggaattatttttttcgaaatttcgtcgcggaggcgtcgtagcggagggtgagcggagattggcggagtttaaatttgcgagagttggaggcggcggcgggcgggcggttgtcgttcgagcgttgcgtttgcggggggaggggaggcggttgttgggagggagggaggtagggcgggcgggagggaggacgggcggagggagggggaggaggaagaggagggaattagggaggggggacgcgttgggatcgcggcgtgcggcggtagacggagtttgggtttttagcggtaaggtgaggtagagttgcgtttttcgttgaacgcgggtcgagttcggcggttgcgggggagacgcgtaggagtttagatcgcgatcgagagcgggagttaggcgggcggcggcggcggagggggagttcgcgagtcgtcgggcggagagtttaagtcgcgttgtcgtcgcgtagggacgatttggttaatatttatatatatttatatatatttagttcgagcgggcgttcgcggcgaatcgttaatatggcgttggggtttttgttcgagcgcgggcggcggcggtagcgcgggagttgttgagttcggttaagtttagtttagttgcgggagttcggaggatcgtacggggttgtcgttatttgttcggaggtttcgagttcgtttcgtttcgtttttattcggtttagagtttatttttcggcggggtcgatttcgagggtagtcggttgttagtagacggcgagggagtcgagtgagcgcggcgtcgcgagcgggttgcgggtagtcggggatcgtaaattttgttgttcgtcgcgttttttcggttcggtttttttttcgttcgttaacgtcgttaattttttttattttttatatttttttttatttatttaatcgtttttcgttttttttcgtcgtttcgagttcgtttgggggaaaattttaaagagtcggatcgtaggttttttgtttatttttttatcggggattttaggttagtgttcggaatatttttttttcgggagatcgcggacgggtgggcgggcgggcgcgttgagggttgtagtcggttttttttttcggggttttttttcgtagcgtatttcgcgaagtttttgtttcgcgtttttttttggttgtttggttcgttttcgtttttattttatagttatgttatttaaaatgtagttaatttaagcggtttcgcgtgggtattagggagggagggggcgcggttgggggtttggcgtttttcggtgggttaggaggagagtagggagttcgtagagtggaagtttgtagtttgtgtgtgtttgtgcgcgggagcgcggtcgtcgttgagcgtcgcgagtcgggcggaggggggggaggtgggttggaagttgggaagttgggttcggcgttagttcgcgagtaggaaggggagggtagcgggttgtcgtttgttttttttttcgattcgggaaagaattgtaaaaatttttagtcgtcgttatcgtcgtttcgtttcgttttttcgggggtcggtcgtttttttaagtggaacgtcggcgtgtgcgtgcgcgagggtgtgtggcgagtgtttcgggtcgagtcgagttcgatttgtcgtcgttgtcgcgtaattcgggaggggagtttcgtttttttttggtttgttttaaagtacgaattacgtggattaaaaaaaaaaattattaagaaatcgagtagagtaaggggtttcgatttggttcgttcgttagttaggttagacgttttgttttgtaaatgtttttttaagattataatttgcgatttttttttcgttttttttttttttttttttttcgatgtttagcgtaggttttaagttatgagtttttaggggtgggtgtagaatgtgtttgtgcgggggtagcgtcgtggagggagggcgggggcgggcgagatttgggtttttcgttgggtaatggggagtttggtgggtagttttgatgggcgtgtgaaagtttgcggtcggaggaagttggttttattcggagggcgtgtggtaaggaggttgtaggcgaagaggaatttgcgtatcggggtaagattttcggttaaggcggggagggcgaggcgtcgcggggttcgcgttcggagtcggcgggcggttgcgtcgtagagttttcgttaattcgggggttcgcggcggcggtgacgagcgtttgttgtttacggagagagttttggggtatcgtgtgtggagtagggcggtcgaagttacgcgtggtttcggcgggtttttcgtcgttcgtacgttcgagtgggtttttttcggggtttcggagacggacgagtttggtagcgtgtaggtcgtggtcgggcgaggcgtaatttgttgttaatgaattttttttagaaagttcgcgatttttagttagaggttgtgagtgttcgcgcgttagggcgcgcgtcgtcggcgtttggagggtgggggtggggggaatggaagagcgaagaaggaaggaggagggttatgtgtatttagaaataaattttaaaaagaaattaacgcgttttaaataggtattcgtatagtttcgttgcgtttagattagatagttcggggttttagttgtgtttttttttttttttttcgttttgagaagacgttagaggaggggtagtgtggtatttggttttaggggtagttttttggagaaagatttttaaaatggtttgggagtaaagattaggaggaaatggtttattttagaaggtggtgggtggtgagtgtagatagatttgggtatttttggttatttgatattttttgtggtattggaaacggatatcgcgggtcgaaattaatttttacgaagtgttgggttcggttttgttaatagaattgtttgcgtggaaggtattttaattgttagttttaaagatttttgtacgtggatatttagggaatacgttcgttttttgattttgtttatttttttttcgatttgttatttggtgtgggttttgtagtgttggttttcgtgtttattttgggtagggttttagcgcgtagagcggagtggggggggaaggcgatgattaatatgttatttaggtttaattcgaggttggtttttagtgtgcgggtatatatcgttacgtatattaattgttttggggtgtttaggggagcgcgcgggttttgggtagtaggcgttcggtcggtaagtcgcggttggggttcggttggttttagcgttgttttttgaggcgttgttattagtaggtgattgagagttaattaggaagtgtttttcggattaatgggttgtatagtttattagcgattttttttagttttttgtagggtcgttttggttttcgttttttatataggtcggggtttcgttgtttaggttgcggggagcgtcgttgggaagtggggaggggtcggtagcgagggacggcggggaagcgagtgtaatttcgcggggcggcgcgttgcgtgcggcgtttcgaggttcgcgtagttcgttttttttttttgttcgcggtcgtttttattgtgtttttaattcgttttcgttcgcgtcgttgtttggttgttttttttcgtttttcgcgtttattttttgttttttaagtacgacgtttgtgtttttcgtttagtttaggattagataagataaaaataggattgtttagcgcgcggagttgtgattgtgtttcggtagtcgggttggtgggagcgcggggggtcggagttggagaggattcgtggtgcgttcggagcggttagtgtttgtgggttttttatttttatttcgtaggtatcgttacgtttttcgggttttgttcgtcgtgaatcgtgcgggtcgggggatttgggtagggttttcgcgttttcgcgggtgttgttggtgtgtcggtgatagatcggtttagataggtatgtaggttttttttcggttgaaggattggaggggggggaggcgcggagatggtagtagattttgtgagttgcgagtgagcgagttagttttcgggtttagcgagttgggtggagggaaggtcgtgggggttttttttaattttttaaaggtcgtggtggggtagtgtaatagggaaaggggggtaaagagtttagtggaaatttttggaggtagagtagttcgtagtggggaggagttgtgagtttgggtttagggttttttttttttttatgtgtgtacggttatattttggtgtatcgggttcgatttttttataaattaaacgtagttgttagatgatttagtttgattaggtattttttagtcggggagttgtgaatatatataatgaatatttttattttaaaaattgagtttggaagatagacgtagatttaatgtttttaaagagaatttatgcgggtgtttaaggacgggaaggtttgtatatagttgtagtcgggtggggtttttgattatgattgttgtagattaaggatttgagtttgaaatgtttcgttagtatgtataggtatgtattgaagagagtaaagcggtttttgagttgtttttatataaatagatatatttttaattaggaatttgtgaggagttagatatgtgtaaggagatagtttttaaagaggagttggatattgatgtgttgtgagatttatcgtttgtgtgtgtatatatatggttaatattaaattggtttaaaattttaatatatttttgtagatatttatttagttttttttttagtttgaaatgggcggatgggttattttatatataaataatttattattaatattttagttttttttttttttttttttttttttttaagagtttgtgattttaagggattttttgtttatatttaaattgtaaatttatattggtttggtttgggaaagagttatattataggtaaagtaaaaagaatggaagtagtacgaatgtttagattaagatgtgcgtttgaatgatatgtgttgagataaattaagatatttgggtttcgttgtttaaatggaataagagatatataagagataaagaattggttaaggggaatgtaaatatgggtatgtaaatatagagatgtatagcgatattttgagagaaaaattttagattttgttgagttggaaattggggtagaatttttgtaagtgcgttttagagataatagtttatttaaaggtgtgaagagggttatttggaaatataaaaagtatttatatgtatatatttatgtttagatatataggttgaatgataaatattttttaatgtttgacgaagatttttttgtcgagtgagtgagatcgatttgggtatagaagagtgggttatataattatatttatatatttatttatagggaaataatgtgtttttggtttgaaggaaattgagggttacgttagtagtttaaaggatggatggtgtgtagtgaa

SEQ ID NO: 186 - DNA, 2264 bp, Artificial Sequence
  chemically treated genomic DNA (Homo sapiens)
gattagtttggttaatatggtaaaatttcgtttttattaaaaatataaaaattagttgggtatggtggtgtgcgtttgtaattttagttattcgggaggttgaagtaggagaatcgcgtgaatttaggaggcgtaggttgtagtgggttagagatcgcgttattgttttttagttcgggcgatttttaggttaaatcgtgttcgatataaaagtttatatcgatatagatttttcgatataaaagtttatttttttttgataggtttgatcgatttttttttttataaagataaaagttgttttaatatttaagaggaattatattgcggtgaaaggggtgttacgaattttgggttttagtttttgtattacgttttagtgtgatattggattttaatttttttattattaaagttaacgggttattataatttttttagaagtagttttaatttttaaagataagattaaaaatattaatagtgtttgagtttttggaatcgaattagtattggagttttgtttggtcgttttttttttttttttttaagattaacgatttggagggaattttggtgagttcgagttttcgtaatttgttagggattaattagaagttcggcgagtagttagtaatataatttttgggtatttttttagttttattagtatatttttttttatttcgttttttttcgttgtagttttttttaagtttatatttgcgttttcgttagttttttttgggattttatcggtgtcggtagttttcgggttttcgggtatagcggtcgttttattcgatttttttgtttttttatttttgtcggagggcgattcgtgggtatcgtttattacggataggattggaggggagaggagatcgcggagatgtttgaggtagaagttcggaaattcgagttgtataggttaggattttattttttgtcgtcgcgtagcgatgatattatttttatcgtttttttgaggggttattttgaggcgcgcgtagaggattagaggatttattttaattttggtttggcgatagtgggaagcgggaaaattggacgtaaagagtttagattatggatttttttcgttaggaaattagtatttgtgaaggagcgtagttttgtttattaaataattttttttttttcgtttgtttaaaaatgtaatgttagttaattttttcgttaattttttagagtaaagttgggggattgggagaaaatttagtttcgttgtatggcggtgtcgtggaatgaggtttttcgggattggtaaatttttaggtaaggatttaattttgtatattttaattggttcgaaatcgcgggtttgtgtgtatatagaattgttagtattttttttttatttcgtaagtattttaataataaaaagttatatagttcgagtagaatttatttaatttatttatttatttataattattgattgtttatttcgatttagaaatagtgttagtattagggaataaaatatatatagtttttatttaattaaatgattttttttagttcgttagtattgaagattgaggtttgtttttataagtttgatatttttttattagtttggttaattttattaaaattaagaggaaagtttaaagagaggaaggtgttttttttgaacgttttattttaatgaattagtttacgtattgggaggatgaagtggtgaggatatttttgttttaaaatttttttttttttttttattgagatacgagggggagggcgttttatttatttgggtatgattaggttttcgtatttattatatatttaatttatgcgtgttgaaagaatggatttggaaatgtaggtgcgcgttatatttatttttttgtttttacgttgtttggacgaattatcgtattttttgttttaggagtttttaaaatttttggggaaggagcgtatttcgggaggcgcgtataggtgggtttgtttgtttttttttatttgtataatgggggtttataaggcgttgtttttatgtttcgagaggcgtgtttcggtatagtaaagtttatttgcgttggttcgcggagtttcgtttagttaggtgagttagggggcggggcgcgggggcgcggtgacgcgtgacgtcggatttcggaagtgacgcgttcgtggggaaaaggtagggagggggtggtgtttttagtcggtttggggggtgcgttgttcggagacggaaagtttgggagttcgagtaggttcggttgtag

SEQ ID NO: 187 - DNA, 2264 bp, Artificial Sequence
  chemically treated genomic DNA (Homo sapiens)
ttgtagtcgagtttgttcgggtttttaaatttttcgttttcgggtaacgtattttttaaatcggttggggatattattttttttttgttttttttttacgagcgcgttattttcgggattcggcgttacgcgttatcgcgttttcgcgtttcgttttttagtttatttagttgggcggggtttcgcggattagcgtaggtggattttgttgtgtcgagatacgtttttcggggtatggggatagcgttttgtgggtttttattatgtaggtggaaagggataaataggtttatttgtacgcgtttttcgaagtgcgttttttttttaaaggttttgggagtttttgggataggaaatacggtaattcgtttaggtagcgtagaaataaagagataaatgtaacgcgtatttatatttttaagtttatttttttagtacgtataaattaaatatgtaataggtgcggggatttagttatatttaggtgaataaaacgttttttttttcgtattttaatgagggaagagaagaaaattttaaaatagaaatatttttattattttatttttttagtacgtgaattagtttattaaagtgaaacgtttaaaggagatatttttttttttttaggttttttttttagttttaatgagattaattaaattgatagaaaagtgttagatttgtaaaaataaattttaatttttagtattggcgaattgaaaaaaattatttaattgggtagaaattatgtgtgttttgttttttggtattagtattgtttttaaatcgaagtaggtagttaatagttgtggatgaataaatgaattggataaattttgttcgagttatatgattttttgttgttaaggtgtttgcggaatggaggggaaatgttagtaattttatgtatatataggttcgcggtttcgggttagttgaaatatataaggttgagtttttgtttgaaagtttattagtttcggggagttttattttacgatatcgttatataacggaattgagtttttttttagttttttaattttattttgaggggttaacgaagggattaattgatattgtatttttagataggcgaaaaggaaaaagttatttagtaaataaaattgcgtttttttataagtgttggttttttagcgaggaggatttatagtttgagttttttacgtttaattttttcgttttttattgtcgttaaattaaagttaaaatgagttttttagttttttacgcgcgttttaaaatgattttttaggagagcggtaggggtgatgttatcgttgcgcgacgataggaagtaagattttggtttgtgtagttcgggttttcgagtttttgttttaggtattttcgcgatttttttttttttttaattttattcgtgatggacgatgtttacgagtcgtttttcgataaaggtggagagataggggagtcggatgagacggtcgttgtgttcggggattcgggggttatcgatatcgatggaattttagaggaaattgacggagacgtagatgtggatttgaaagaagttgtagcggaggaaggcgaggtaggaagagatgtattgatgaggttgaaggaatatttagagattgtgttattggttgttcgtcgggtttttggttagtttttaataagttacgagaattcgaatttattagaattttttttagatcgttaattttgagggggaagagaggggacgattaaataaaattttagtgttggttcggttttagaggtttaagtattgttaatatttttagttttgtttttagggattaaagttatttttaagggagttataatagttcgttggttttggtggtgaggaaattgggatttaatgttatattgagacgtagtgtaagagttaaaatttaggattcgtagtattttttttatcgtaatatggttttttttagatgttaagataatttttgtttttataggaaggagggtcgattagatttgttaaagggagatagatttttatatcgaaaagtttatatcgatatagatttttatatcgaatacgatttaatttgagagtcgttcgggttggagaataatggcgcgatttttggtttattgtaatttgcgttttttgggtttacgcgatttttttgttttagtttttcgagtagttaggattataggcgtatattattatgtttagttaatttttgtatttttagtagagacggggttttattatgttggttaggttggtt

SEQ ID NO: 188 - DNA, 2346 bp, Artificial Sequence
  chemically treated genomic DNA (Homo sapiens)
gattttattttaaaaaataaaaaataaaataaaattaaaaagttaataaaaataaaaaacggttaggcgtggtggtttatatttgtaatttcggtattttgggaggtcgaggcgggtagattatttgaggtcgggagtttaagattagtttgattaatatggagaaattttatttttattaaaaatataaaattagtcgggtatggtggtgtatgtttgtaattttagttattcgggaggttgaggtaggagaatcgtttgaatttgggaggtagaggttgtggtgagttgagatggtgttattgtattttagtttgggtaataagagaaaaattttattttaaaaataataattaaattaaaaaataaaaaataaaaaggtagatatttgaagatatacgggatgtacgttggggaggtttcgttgttattttttgtttttagtttcgtttataatgtgtatttgggggtttagaggtggtatagttttgtttgtttgggtaggagggtttggtgttgatttggtggggtttggtttttttgagtattttttataagggtttgattgtgggtgaggggcgtagggagtagtcggttttaagttgggtattgttttgtgagtttgggggtagtttagggttttttagattatattgtttaggtcggggttggtttcgttggttgagtgggtttttgtttttatgggattttgttttgtagttgatttttaaggttaaggaggttttagtggggtggggtttggttttggatgtggttgacgtgtgttggggttgtttggggtttaggcgttgtgtttcgtttttaggagttggaatagtagtttatgatggagaaaagaaattatcgtaagattttgaagttttattagaaatttttatagaaggaaaagaggaataaaggtaaggtttttgtgggtataggttcgagattttggttgtaggtagttcggtttttatttattttgttttatttataggtttcgacgttaagattatgttgtttaagttgaaagggtagttagaagaaatgaaatttagggtgtaattttttagtttggttaagaagtatttgtaggtaagtgggtttcgggtttcgttttgtttcgtgaggtagtagttttagacgggttttttattgttggatgttgtaaatttgttcgtgtgaagttataaaaggggttttgatttgagggtttaatgttaggaagttttggggcgaggggtagagtgattaagcgttcgtgtttcgtttcggtaggttatgtacgcggaacgttggggtttggagttttgtatttttttagtgatcgtgaatatcgcggtcgtattttgcgatacgttggattttagttttttggacgagtttttttcgtttattttttataacgttaataagtattcgggcggtcggtagaaggttcgtattttgtaggtcggtacgtcgttggggtttatggtttatttgtattttaggtgcgttgggagaaaagtttattcggaaaaggagacgtagttcggggtgttgagaagagggggggaacgtgttttcgttagttagttaggttgggtttgtattttttagtttagagaaatgtttaatcggggtttaggttaatgtgtattaggtgttatcggtagttttgtagagttttggttagagtggttttcgtcgtttgtgggtttgggtattaggttttagggtgcgtttggtggttttcggaggtgttgcggaatcgttttatataattaatatacggaatggtttttaaaaataatacgtataggtagttcggcgatgtggtttggattttatttaatttatcgagttagaatattcggggtaattagttttagggacgggtgaggttggggtgtttttgtagttttttttattcggtgtgtatattggtttaggagatttttgattcgtaaacgttggtgtgcgtacgtacgtttgtagtagggaggagtcgtcgggtttatttatttttattagggttatagggttagattttcggtcgttttattagtttttttggttttttatttattttggtttgtatgggtttttgggttgtattttgtttttaggtattgggagttgtagtaggttttggatttattggtttgattagtttttagagaggttattttgttagtgattggggttaattttatgttggtttatgggatttttatgatattattttggagttttaagggttttttttgagtagaggttatggggtttagtaaaggacgttaaggaggatagtagggagttagggtttttagtagttagtggggataggtaggtttttagaga

SEQ ID NO: 189 - DNA, 2346 bp, Artificial Sequence
  chemically treated genomic DNA (Homo sapiens)
tttttgggggtttgtttgtttttattggttgttgagagttttggttttttgttgttttttttggcgttttttgttgggttttatggtttttgtttagagaggatttttggggttttaaggtggtgttataagggttttataagttaatatggggttggttttagttattggtagggtggtttttttgggagttggttagattagtgggtttagagtttgttgtagtttttagtgtttgagaatagggtgtagtttaggggtttatgtaggttagagtgggtgaagggttaagggggttggtggggcggtcgggggtttggttttgtggttttggtggaggtgagtgggttcggcggtttttttttgttgtaggcgtacgtacgtatattagcgtttacggattaggggttttttgagttagtgtgtatatcgagtggagggggttgtagaaatattttagttttattcgtttttggagttaattatttcgggtgttttgattcggtgagttggatggagtttaggttatatcgtcgagttgtttgtgcgtgttatttttggaagttatttcgtgtgttaattatgtagggcggtttcgtagtattttcggggattattaggcgtattttgagatttggtgtttaggtttataggcggcggaggttattttggttagggttttgtaaagttgtcggtggtatttagtgtatattggtttaaatttcgattaaatatttttttaaattaaaaagtgtaaatttagtttagttgattggcgagggtacgttttttttttttttttagtatttcgggttacgttttttttttcgggtgagttttttttttaacgtatttggagtataggtaggttatgagttttagcggcgtgtcggtttgtaggatgcgggttttttgtcggtcgttcgggtgtttgttgacgttgtagaagatgagcgaggaggattcgtttagggggttgaagtttagcgtgtcgtagggtgcggtcgcgatgtttacgattattgggagggtgtagggttttaggttttagcgtttcgcgtatatgatttgtcggagcgggatacgggcgtttggttattttgtttttcgttttagggttttttggtattggatttttaaattagggttttttttataattttatacggatagatttatagtatttaatagtgggaggttcgtttgaagttattgttttacggggtagagcggggttcggagtttatttgtttgtagatattttttgattaagttgaggaattgtattttggattttattttttttagttgtttttttagtttggatagtatggttttgacgtcggaatttgtgggtggagtagagtgggtgggggtcgggttgtttgtagttagggtttcggatttgtgtttataggggttttatttttgttttttttttttttttgtaagagtttttggtagaattttagggttttgcggtagttttttttttttattatgagttgttgttttagtttttggggacgaaatatagcgtttaagttttaggtagttttaatatacgttagttatatttagggttaggttttattttattggggtttttttggttttggagattagttgtagggtagggttttatggagatagaggtttatttagttagcgaggttagtttcggtttgggtagtgtggtttggggggttttgggttgtttttaggtttatagggtagtgtttagtttggggtcgattgttttttgcgttttttatttatagttaggtttttgtgggggatgtttaggggaattaggttttattaagttagtattaggtttttttgtttaagtaggtagggttgtgttatttttgggtttttaagtgtatattgtgggcggggttgggggtagggggtggtagcgggatttttttaacgtgtatttcgtgtgtttttaggtgtttgtttttttattttttattttttaatttagttattatttttgagatggggttttttttttgttgtttaggttggagtgtaatggtattattttagtttattataatttttgttttttaggtttaagcgatttttttgttttagtttttcgagtagttgggattataggtatgtattattatgttcggttaattttgtatttttggtagagatggggtttttttatgttggttaggttggttttgaattttcgattttaggtgatttgttcgtttcggttttttagagtgtcgggattataggtgtgagttattacgtttggtcgttttttatttttattgattttttaattttattttattttttattttttgagatgaggtt

SEQ ID NO: 190 - DNA, 3106 bp, Artificial Sequence
  chemically treated genomic DNA (Homo sapiens)
ggcgggcgttgtcgagtacggggaggtgttgaaatagttttggcgtgttgatttaagttttgattggtagagttattcggtgattgatagggggtttttatggcgttcgcgtcgttaattcgtttattttaatagcggagttagttcgtttgtcggcgtgtttgagtcgagtcgagttcgaattttaagtcgcggagttagtattttttttagtcggggtcgttcgttttcggtcgttgagttatcgtcgttattcggtagtgtgtttcgttgttttaattcgttttattaataagcgtttggtatatttagttaggttcgcgggtatttgttgcgtgtttcgtttcgggtttagtgttttcgtcgtcgtcggtattgtttcgatgttttagttgtttattttgaattttagtttttagtaagtggtcggggtatgtgagattttggaagagagcggcgatgtggagcgtttgggtcgttttttttggtcgttgttcgtggtttttgcggtttgcgaggtttttaataagaatgagtcggtgttacgcgtacgagttatcgtggttttttacggtggtaattatcgcgagttttattatattttggaaaattataagtttattaaggagtcgtacgttaagttgtaggcgttgtggtttgaagtatattattaggaggttgagaagttgcgtggaagatttttgggatttgtggataagtatcgagtaaggaagaagttttcgttgtcgcgtattatttgggacggcgaatagaagatatattgttttaaggagcgtacgcggtatttgttacgcgagtggtatttgtaggatttatattttaattttagtaaaaaacgtgagttcgtttaggtaatcggattgatttttacgtaggtgggtaattggtttaaaaatcgtcgataaagggatcgagcggttgtagttaagaataggtcggtatttagaggttttcgcgttttgagcgtatcggggaggaggcgggtggaggtatttttggcgtttttatttagtttttggcgattttaatttagtaggagttgggagcgcggtttgttttgggttaagagttttgcgttttgggtttttggtcgggagtttttttgtcggttttgtttttttattcgttggttttttacgtttgcgggtagttgtagtagttggtttcggttattaaattaaggttttattgggacggagaggggaagagaaataaaaaattaaaattttataaatagttagggattttaagatttaaagttaatttttgttagtttgggtataggtttttattattaatcgaagtttggtttattagtaatgtgtcggttttatgttaattattatttttaaagtttaggtatatttttttttaatgttttgaaaatagtttttaatggatttttgagaaatgggaagtcgagtttttttttttttatgcgttgtttgttatttttgttttaaaatagtaaattagttcgtgggtcgaggtttttcgtttttcggagtgtggatttcgattagttaaatattttgcggaagagttcggttttattttttaggtttaaatgttttttataattttttttgtttttaggtcgggtcgattcgatttaacgcgatcgcgggagtatttgtttaggcgtaagttttaggtagacgtatcgttagaaatggtattttatgtttttgggatcgatttgtttttgttatttatatttcgtttattttttgatagttttgtaaattttttaaaagtgtataataaatagggaggatattgtaagtttagtatataaaagatttgggagttgcggcgttgagaaagggcgcgaattatggtggggtataatagtagggattcgcggaggggcggtcgcggatttttgttcgatttttgtcgttttgtcgagtaattttcgttttaattgttggggttttcggaagaatttttagtcgtcgggttggagggacgtaggaggtggtgggggcgggcgacgggcggttgtgttacgagttgtgattcgtgttttttttttttttcgtagattttagtagtaggttttgttatagggtttcgggcgggtattacgggcggagggcgacggtacgttagaggtgttgggcgtcgttattagttcggtcgttagtttatttagtaaggcggttattttagttatttttattacgtttagcgatagcgagtgcgatatttgagttgtttatttaggatgtttagaagtagattttagtgtaaaaacgagaaaaataaaatgaaagaggggaagaagatgagagatttgtaaatttagcgttatagaagttaggtgattagggattcgcgggttcgggttgtcgtttttcgttttatttcgcggtcggtttggttttattggcgttttttggtcgcgattacgggaattagcggtgaggtttgatttagtattacgttttttttgttttgtttttttttaaggattttgttgtaaagttttttcggaattcgaattgtaagttgagcgtttgtttagatttttttatgggtattttacgtcgaaaggacgttgttatatatgtataattttcgttttaaagtttttttttaataaaatatatatatgttgtttatttatttatttaagagatcgttatggtaggtttttttgtagtttggggaatttgttgtttttaaatatgtaggttggtggtgatgggttttgtgtggagaagttaaataataaaataatttagtgggtaatttttttaattaagggagttgtttttagattttttttttttttattattattaatattattttttttattaggtatgtagggatttttgagtaaatggttttcggaaggttttatttatatattttttgttttttttggtgttttttggtatatgttttaaataatttatggtaggtttataattattttttacgttaaattatacgtatgtgtatatatgtatgtatttatataaatatatgtatgtatttatataaatatatgtatgtatgtatatacgtgatatatttaaggttagaaattggtaatatgtgagcgtttttttta

SEQ ID NO: 191 - DNA, 3106 bp, Artificial Sequence
  chemically treated genomic DNA (Homo sapiens)
tagagaggacgtttatatgttgttaatttttagttttaaatatattacgtgtatgtatatatatatatgtttgtataggtatatatatatgtttgtataggtatatatatatatgtatatacgtgtaatttgacgtgggaggtggttatagatttattataggttgtttaaaatatatattaggaagtattaaagaaggtaaaagatatataggtaagatttttcggagattatttgtttaagggtttttgtatgtttggtgaagggaatgatattaataataataagaagaaaaggaatttgagagtagtttttttaattaagaaggttgtttattaggttgttttattgtttggtttttttatatagaatttattattattagtttgtatgtttagaaatagtaagttttttaagttatagagaaatttattatggcggttttttaaataagtaaataaatagtatatatatgttttgttaaaaaaaaattttaaagcgaaagttatatatatgtaatagcgttttttcgacgtgaaatatttatgggagaatttgggtaggcgtttagtttgtagttcgggtttcgaagagattttgtagtaaaatttttaggaaaaagtaaagtaagaagaacgtggtgttgggttaggttttatcgttggttttcgtggtcgcggttaaagggcgttagtgaagttaggtcggtcgcggggtggggcgggaaacggtaattcgagttcgcgggtttttggttatttggtttttgtggcgttggatttgtaggttttttatttttttttttttttttattttgtttttttcgtttttatattggaatttgtttttgagtattttggatgggtaatttagatgtcgtattcgttgtcgttggacgtgatggagatggttgaagtggtcgttttgttggatagattggcggtcgggttggtggcgacgtttagtatttttggcgtgtcgtcgtttttcgttcgtagtgttcgttcggaattttgtgataggatttgttgttggagtttacggggaagaaagggaatacgggttatagttcgtaatatagtcgttcgtcgttcgtttttattattttttgcgtttttttagttcggcggttagaggttttttcgaagattttagtagttaaggcgaggattattcggtaaggcgatagaggtcgggtaggagttcgcggtcgttttttcgcgggtttttattgttgtgttttattatgattcgcgtttttttttagcgtcgtagtttttaggttttttatatattgggtttgtagtgttttttttgtttgttgtgtatttttgggagatttataggattgttaggaaataaacgaagtgtgggtgataaggatagatcggttttagggatatgggatattatttttaacggtgcgtttgtttggggtttacgtttgagtaagtgttttcgcgatcgcgttggatcgggtcggttcgatttaaaggtaaaaaggattgtaaggagtatttgggtttgggggatgaggtcgggttttttcgtaaaatgtttggttaatcgagatttatatttcgggaaacgaaaagtttcggtttacggattagtttgttgttttgagataagagtggtaggtagcgtatgggaagaggaaaattcgattttttattttttaaaagtttattgaaaattgtttttaaagtattagggagggatatatttgggttttgaaaatgataattaatatgaaatcgatatattgttaataagttaggtttcgattaatagtaggagtttgtgtttaggttgataagaattagttttgggttttggggtttttaattgtttgtaggattttaattttttattttttttttttttttcgttttagtgaagttttggtttggtgatcgggattagttgttgtagttgttcgtaggcgtggggagttagcgggtggggaagtagagtcggtaagggaattttcggttaggagtttagaacgtagggtttttaatttaagatagatcgcgtttttaatttttgttgaattggagtcgttagggattgggtaagggcgttagaggtgtttttattcgtttttttttcggtgcgtttaaagcgcggaggtttttaggtatcgatttgtttttggttgtagtcgttcggtttttttgtcggcggtttttgaattagttgtttatttgcgtaggggttagttcggttgtttgggcgagtttacgttttttgttggggttagggtatggattttgtaggtattattcgcgtagtaggtgtcgcgtgcgttttttgaagtagtgtgttttttgttcgtcgttttaaatggtgcgcggtagcgggaattttttttttattcggtatttgtttataggttttaggggttttttacgtagttttttagttttttggtagtgtgttttaagttatagcgtttgtagtttggcgtgcgattttttggtgaatttgtggttttttaggatatgatagagttcgcggtagttgttatcgtgaaaggttacgatggttcgtgcgcgtagtatcgatttatttttgttgagggtttcgtaggtcgtaggggttacgggtagcgattagaggaagcgatttaggcgttttatatcgtcgtttttttttagggttttatatatttcggttatttgttgggggttgaaatttaagatgggtagttggaatatcgaggtagtgtcggcggcggcgagggtattgagttcggagcgggatacgtagtagatgttcgcgggtttggttgagtgtgttaggcgtttgttgatgaggcggattggggtagcgggatatattatcgggtggcggcggtggtttaacggtcgggagcggacgatttcgattggaggaggtgttggtttcgcggtttggggttcgggttcggttcggtttaggtacgtcggtaggcgagttggtttcgttattggggtgggcggattggcggcgcgggcgttatggagattttttgttagttatcgggtggttttgttaattaaagtttgaattagtacgttaggattattttagtattttttcgtgttcgatagcgttcgtt

SEQ ID NO: 192 - DNA, 2508 bp, Artificial Sequence
  chemically treated genomic DNA (Homo sapiens)
ggagaggttggaaaaatgagttttgaaattgtagttttataaaagtaaaattgagaaaagatataatagtgatggagaaagttagacgggtattaaaaaataaaataggagttttttttaggtcgcgtttatacgggttcgtcgcgttcgttcgttattatcgatattttattttttgtttttcgtatgggaggggtaagaacgcgattcgttcgtagtttttaggtaggtgatgaggatagttagtttcgcggtttttcgttagttggcggcgggggtcggttaggtgttcggatttttcgagggttttatcgtcgcgcgtttcggggatcgggatcgttattcgcgttttatttgcgcgttcgggttttagggttttgttttcgggcggtggcgcgggtttggttttcgtcgtagttacgatcgtttttatcgttttcgtcgttttcgttcgggaagtggcgagtcggttcggtttgtttcgttcgtttttcggttcgtatttacgttttatatcgtgtagtttggttcgttttttttttagtttgtttttgaggttttcggtttcgttttttagcgacgttagcgtttcgttttcgtgtagtttttcggttgttattttcgcgcggggacgtagcggagagggaagcggagagcgggaatgcgttgagtcgcggcgggcgtcgttttagtagtcgttttcggtttcgagtatcgtttcgcggtttcgtttttcgcgatgacgttagtagttgcgggttcggttgttgcgtttgagttttaagatttcgtatttgggcgcgcgttttggcgtagtgtttggtgcgatgttcgcgttagtttttttttttcgggagaggtagggagtgtgacgtttattttattagcgggtaaattgtggtttagggatgttgggtgatttgttcgaggacgtatatagagggaagggttaagtcgggattttaattcgggatttttcgtttttggggagatcggtgaggttttcgcgatatggtttttttatttttaagtttttcgtgtagattttcgttttgtgggatttgattgcgggttgcgggttcgtggtttttgtaggtagagagaggacgggagaggagacggttacgaggtttggtcgtaggtagttacggtgtttttttaataaggaatcggaaatttttttcgtttgttgatttaaatatataaaaataaaattagttgttgggtttttagacggagtttttgcggtattaggaggtttatttttatttttttttttttttacgtaggaattaggtttttggtttgggggcggtaaaaggagatggcggtgggttaagtgggcgcgtaggtttagatttggggtttttgagtttacgtttaggtatttcggattttttatttttgaggttattttttgttttttagaatgaagggttggtatagttttgttaggatgtacgtttagcgatttttgttagattgaagtatttttttttcgtaagcgtttgaagtgtgagaggtattgttttaagtgttttaatttgtatttgtttaatttttataggagttaatttgaatgggtatatttatttttattttatagaagaggaaattggggtatagaaagattgagtaattgtttagggggtatgttttaagaaagagggagagataggatttggatttagataggttggttttttagtgttttggattttggtgtggatgatttaatttaagttttttttttttttttttttatgtgattttgtatgcgtttgtgtagagaatgagaaggtagattaaagttatagatgttgcgagaatatcgttaagtagaattttgggtgttgtttttatttttttgtatttgtttttttttagagaagttagtttttatttgttgtttcgggttttttttatttgagaaaagttgaaggtattcgatgttaatttgtatatagttgttttgtaggttagagtttgggatttttcgtttttttatttggaaaagtttttttataggatttgttttataggattgttatgagaattaagtaagatggtgtgggtcgggtgcggtggtttatatttgtaattttaatatttcgggaggttaaggtgggtgtattatttgaggttaggagttcgaaattagtttggttaatatgatgaaattttttttttattaaaaatataaaaattagtcgggcgtggtggtacgtgtttgtaattttagttatttaggaggttgaggtacgagaatcgtttgaattttggaattagaggttgtagtgagtcgagatcgtgttattgtattttagtttgggtaatagagtaagatttaaaaaaaataaaaataaaaataaaaataaaataaaaaaaggtaagatagtgtgggtgaagattttagtagattttttcgtatatagtagatgtttatttattgttagttttttttttcgtttttattcgtataataataggtttatttgtcgttgtttt

SEQ ID NO: 193 - DNA, 2508 bp, Artificial Sequence
  chemically treated genomic DNA (Homo sapiens)
ggaatagcgataagtaaatttattattatacggatgggaacggaaaagagaattagtagtgaataagtatttgttatgtacggagaagtttgttaaagtttttatttatattattttatttttttttgttttgtttttgtttttgtttttgttttttttgagttttgttttgttgtttaggttggagtgtagtggtacgatttcggtttattgtaatttttgattttagggtttaagcgattttcgtgttttagttttttgagtagttgaggttataggtacgtattattacgttcgattaatttttgtatttttagtagagagagggttttattatgttggttaggttggtttcgaatttttgattttaggtgatatatttattttggtttttcgaagtgttgggattataggtgtgaattatcgtattcggtttatattattttatttaatttttataataattttatgaagtagattttatgaagaagtttttttagataaggaaacggaggattttagattttaatttgtaaaataattatgtatagattaatatcgagtatttttaattttttttagatagagaaggttcgggatagtaagtggaggttggtttttttgggagggagtaggtatagagaggtggggatagtatttaagattttgtttggcgatgttttcgtagtatttgtaattttgatttgtttttttattttttgtataaacgtatgtaagattatataggagggaaaaaggagaaggtttgagttggattatttatattaaagtttagagtattagggagttagtttgtttgggtttaaattttgttttttttttttttttggagtatgttttttgagtaattatttagtttttttgtgttttagtttttttttttgtaaagtgggaataagtgtgtttatttaagttgatttttgtgaggattaaataagtgtaaattaaagtatttagaatagtgttttttatattttaggcgtttgcggagaggggatgttttagtttgatagaagtcgttaaacgtgtattttggtagaattgtgttagttttttattttaaagggtaggaggtggttttagaagtgagaggttcgagatgtttgggcgtgggtttagaagttttaggtttgagtttgcgcgtttatttgatttatcgttatttttttttgtcgtttttaggttagggatttgatttttgcgtgaagaaaagagaaaataagggtgggttttttaatgtcgtagagatttcgtttgagaatttagtaattagttttatttttgtatatttagattaataaacgaagagggttttcggttttttgttgggggagtatcgtagttatttgcggttaagtttcgtagtcgttttttttttcgttttttttttgtttgtaggagttacgggttcgtagttcgtaattaagttttatagagcggagatttgtacgagaggtttggggatgggagggttatgtcgcgggggttttatcggtttttttagaagcggggagtttcgagttggaatttcggtttggtttttttttttgtgtgcgttttcgggtaaattatttagtatttttaagttatagtttgttcgttggtaaaatgggcgttatattttttgtttttttcggaggagagaggttgacgcggatatcgtattaggtattgcgttagagcgcgcgtttaggtgcggggttttggggtttaggcgtagtagtcgggttcgtagttgttggcgttatcgcggagggcggggtcgcggggcggtgttcggggtcggggacggttgttggagcggcgttcgtcgcggtttagcgtattttcgtttttcgttttttttttcgttgcgttttcgcgcgaagatggtaatcgaggggttgtacgagaacgagacgttggcgtcgttgaagagcgaggtcgagagttttaagggtaagttggaggaggagcgagttaagttgtacgatgtggagcgtgagtgcgggtcgggaggcgggcggggtaagtcggatcggttcgttatttttcgggcggggacggcgggggcggtgggggcggtcgtggttgcgacgggagttaggttcgcgttatcgttcgggagtagggttttggggttcgggcgcgtaggtgaggcgcgggtagcggtttcgattttcgggacgcgcggcggtggggttttcggagggttcgggtatttggtcgattttcgtcgttagttagcggaggatcgcgggattagttatttttattatttgtttggaagttgcgaacggatcgcgtttttgttttttttatgcggagggtagggggtggggtgtcggtggtgacgagcgagcgcggcgagttcgtgtaggcgcggtttaggagagatttttgttttgttttttaatgttcgtttggttttttttattattgttgtatttttttttagttttgtttttatgagattgtaattttaaagtttatttttttaattttttt

SEQ ID NO: 194 - DNA, 2535 bp, Artificial Sequence
  chemically treated genomic DNA (Homo sapiens)
ataatggttttttggaattttttggaataaataagataaattaatatattagagtcggtagcgggggtatatcgtgtttttttagaaaaggattaaggggagtggttttagtaacggaatatgagggatttttttatatggatataaagtattaagggataggtcggttttgtttttcgtttttttttagttgtttaattaggatttatttagtttatagtgttttattttatcgggtttttttggagttagttggagatgataaaaattatataggtattggagttagatagttttatatgttatttttatttgagaaatttgggtgagttatatttttttaggttttagtttttgtatttgtagaaggaagagaagataatttatttttaaagcgttgtgataatttagtgagatgatgtttgttaagtttattatatagggtaagttggttttttttcgtttttcgtatttgtttttattgagggtgaaggtagtagagaagatattattagtagttgtttattattgtttggttttggagagggagggattacgtatttttatttaattatattaggtcgttatcgtttgtatgtatttcgtgtttaatcggggttttgaggtagcgtttcgttttttttggatttttttagatattttaggttggaatggtgaggggtaggtgggagtagttaggtttttttttgggtaagtcgtggtgagttattcgtttatttcgtagcgggaggcggtcgggtttgggggttttattgttagggttcgatttagagggtagttcggagtcgttgggtcgtattattacgaagattcgtttgtgtagaagttcgtcgggtcgttcggagtaggtttttttgtggtttttcgacgggcgcgggtagaggcgggcgcggaaggcggtttggaagtcgcggcggaagttttcgttgaagtagtcgtagatgatggggttggcgttgttgttgaagaaggttagttagtgcgcgaaggggaaggcgtagacggtgattaggtgtagttgcggcgcgttgagttgttcgtagtcgatgagtagtagtagcgtttagagcggtagttaggatagcgtgaagaatagcgttattatgattagtatgtgtattacgcgcgttttgcgtcgcgatgttcgcgggttcgtagttttttcgttttcgggggtcgggttcggggtttggtagagtttgcgcgcgatgcgggcgtatatgattacgatgagcgttagcggcgttaggtagatgtgcgagaagagtatagtggtgtagattttgcgtatgtttttttcgggttaggttttttagtaggagtagagcgggtaggagcggttgcgggcgtttattatgaagtggtgttttttacgggtgacggttagcgtgacggtcgagggatatatgatgagtagcgttagggtttagatgacggcgatggtgacgagcgtttttcgtagggttagtttttcgcggaaagggtgtacgatgtagcggaatttgtcgcggggagagagataggcgggatttgggtgggttttagggtttttgcgaggggacggtgggtgggatgcgggtatttgatttttattatcgtatttagggcggcgtcgaagaatagtttagatttgaattggttgagtagttaaagaataaaggtagttataggatttatgagaagggaggaggaaatcgtagatcgtgtgggaataatgaattttgtgtgtatttttgtattttttttttttttttttttttttttttgagatagggtttttttttgtcgtttagtttggagtgtagtggcgcgattacggttttttgtagtttttatttttcgggtttaagtgattttttttttttattttagttttttgagtagttggaattataggaatgcgttgttatttcgtcggttaattttttttaatttttggagagatgaggttttattgtgttgtttaggttagttttaaagttttgggtttaagttatttttcggtttcggtttttcgaatttttgggattatagatatgagtttttttgcggggttatttgtgtatttttgggggttaattgattagttggtagttagtagagcgattagagtgcgtagtttgttttcgataaggacgattaggtgcgttaaataatatagtttttgtttatggattttttagaaaattttaggaggttagatgtagagtttatatgttaggttgtttttatgttattttggttatagtattagtatttttataatgtaaggataagtttgtattatttatttttttatgaggataatttagtatttgttattatattttttattattttttaaaggtgaggtttttaagatagttattatattgttgatttatagataaggaaattgggattcgagtgttaagtagttggtttaagtttatatagtaagttgtaaggattagttttgaatttagatttgttttgttttatatgttatataaattagtagttgtaaatttttta

SEQ ID NO: 195 - DNA, 2535 bp, Artificial Sequence
  chemically treated genomic DNA (Homo sapiens)
tggagggtttatagttattggtttatatggtatatgaagtaagataaatttgggtttaagattggtttttgtaatttgttatgtgaatttgagttaattgtttaatattcgagttttagtttttttgtttgtaaattaatagtgtagtaattattttaaaggttttatttttaaaaaataataaagggtgtaataatagatgttgagttgtttttatgaggaaataaatggtgtagatttgtttttgtattgtagagatattgatattatggttaagatgatatagggatagtttgatatgtaggttttatatttgattttttgaggttttttggagaatttataaatagaaattgtgttatttgacgtatttaatcgtttttgtcgaggatagattgcgtattttgatcgttttgttagttgttagttaattagttgatttttaaaagtatataaatggtttcgtaaggaggtttatatttataattttagaaattcgggaggtcgaggtcggaggatagtttgagtttaagattttgagattagtttgggtaatatagtgagattttatttttttaaaaattgaaagaaattagtcggcgaggtggtagcgtatttttgtggttttagttatttaggaggttgaggtgggaggagaggattatttgagttcgggaggtggagattgtagggagtcgtaatcgcgttattgtattttagattgggcgatagaaggaggttttgttttaggaaaaaaaaaaaaaaaaggagaaaagtgtaaaagtgtatataggatttattgtttttatacgatttgcggtttttttttttttttttataaattttgtagttgtttttgttttttgattatttagttaatttaggtttgagttgtttttcgacgtcgttttagatgcgatgatgaaggttaggtgttcgtattttatttatcgttttttcgtaggggttttaggatttatttagatttcgtttgttttttttttcgcggtaggtttcgttgtatcgtgtatttttttcgcgagaagttgattttgcggaaggcgttcgttattatcgtcgttatttgggttttggcgttgtttattatgtgtttttcggtcgttacgttgatcgttattcgtgaggagtattattttatggtggacgttcgtaatcgtttttattcgttttatttttgttgggaggtttggttcgagaagggtatgcgtagggtttatattattgtgtttttttcgtatatttatttggcgtcgttggcgtttatcgtggttatgtacgttcgtatcgcgcgtaagttttgttaggtttcgggttcggttttcgggggcgaggaggttgcggattcgcgagtatcgcggcgtagagcgcgcgtggtgtatatgttggttatggtggcgttgttttttacgttgttttggttgtcgttttgggcgttgttgttgtttatcgattacgggtagtttagcgcgtcgtagttgtatttggttatcgtttacgttttttttttcgcgtattggttggttttttttaatagtagcgttaattttattatttacggttattttaacgagaattttcgtcgcggtttttaggtcgtttttcgcgttcgtttttgttcgcgttcgtcggggagttataaggaggtttatttcgagcggttcggcgggtttttgtataggcgggttttcgtggtggtgcggtttagcgatttcgggttgttttttgagtcgggttttagtagtggggtttttaggttcggtcgtttttcgttgcggaatgggcgggtggtttattacggtttgtttagggaagggtttggttgtttttatttgttttttattattttagtttgggatatttgagggggtttagggagggcgggacgttgttttagggtttcgattggatacgagatatatgtaggcgatagcggtttggtgtggttaggtgaggatgcgtggtttttttttttttagagttaggtagtggtgggtagttgttggtgatgttttttttgttgtttttatttttagtagaggtaaatgcgggggacgggaaggaattaatttgttttgtgtggtgggtttgataaatattattttattgaattgttataacgttttggagataggttgtttttttttttttttatagatgtaaaaattgaggtttggagagatgtgatttatttaagttttttaggtggaaatggtatgtgaagttatttgattttaatatttgtgtggtttttattatttttagttggttttaagagggttcggtaaggtagaatattgtgaattgagtaagttttaattaggtagttaggaagaagcgaaaagtaaagtcggtttgttttttgatgttttgtgtttatgtgagggagttttttatgtttcgttattgaagttattttttttgatttttttttagaagaatacggtgtgttttcgttgtcggttttaatgtgttggtttgttttgtttgttttaagaagttttaagaagttattgt

SEQ ID NO: 196 - DNA, 2493 bp, Artificial Sequence
  chemically treated genomic DNA (Homo sapiens)
attggtatgattagagtagaaggagggtattttaatttttagttttatttatcgttttgtaagaattaggaaaatgaatttttgttggttataaaattagttgtaggtgatgtaatttattttattcggttttttatatttatagttatataggaataattttttgaaatttagtttttttattcgtaaaatgggatggtaatacgtgtttttgggagttagcgagaattaaaagggataagatgtattggtttttaggggtaagtattagtagataaggaatagggtagttttttttttatattttatagagaagaaatgttttttaatttttttaggaggtagagtttagttttttttttaaatagttttggagttgtttggtttttttatttttttaacgaagttgtgggtagaagataaatgtagagtttttttgtatttgataaggagagagaagtagattttgtgtgagttttttgttgttgacgttgatttatagggggtgtaggatgggattgaggtaggtttatttgtttggaaagtttgtttgtattttgattttatggggttttaatatatatttttttagttataggggttttgtagagttaagttagttgttttatggaggtggggattttttttttgttttgttatttttttttttttttggagaggataggtaggtgggtatggttataggagaatttttcgaaggtgttaattggtttagagaaagaaaggtggtttggtagggagttgtttattagagattgagagagtatgggagaagttgagagggaggaggaaagtgtacgttattttgcgcgtagtttcgttttagggaaagtatgtgtgagaagtggtggtaggcggttgttagttttggaaataaataaatagttaattaaaaggtttcggaaggaaggagtgtttaattaattagtttcgagggataggttcgtattgtttgattgtgttttttagtttggttttaggttatcgagtttaagtttttgttatagttttagggtcgaggttgtttttaaagagttttgtaattgttttttatttgtgttttatttaaatattaaggttggcgtaggtggatatttttttatttttttttttttaggttgggttttagaaattagtagaggagggaggaattagttagcgtggttatgtttgggaggagaggttcgtgtgggtttgtggggttaagaggtaaaggcgggtggcggatgtgggttagcgggagtttggaggggttgatatcgtttgttttatcgtaagtttttggaggaagagtttcgttgtgttcgagagcgagcgcgggtaggtgtaattattcggggttggggtttcgggggtttcgcgtagttttttttttttttagggatatcgtttagttgcgtttcgcgtttcgtcgattgcgcgggttttgagacgttggtggttgtttcggggttggtttgtttttcgcgtatatgtttagggttattcgcgttgcgtttttgttttaggtgtttggttagagaaagggcggtaagacggggtagtgcgtgtgcgcgcgcgggtaagtgtatgtgagtgtatatttatgtgagcgtatgtgtgtttgcgtttgtgcgtgtttaggggaattatagggagtatttttattttaagtttttagaggattgtttgaagtcgttagatagaaatttttttagaatgtaagtttcgggggggagggagttttgtttgatggttgttgtatttttagtgtttattgaagtattggggatatattagatgtttaataaatagttgttgagttaattaacggattttaggaatggaggtagatcggtttttttggaattggagaaaggataaggttatattttatcgttttttttgtttttggtattagttttggcgttttcggtaacgttaattttttttatatttagtttgtgttaagtttttttttttgttcgtgtttatatttttttttttttgtttttgttttttgttggtttttgtgtgtaagtattttagtagttagagtgagaggaagacgaaagaagtagaattttggaaatagagagttattagggtggttttttttttttggaaggatacggaaagatggggtgagattggcgtttttttttagtttttttttttgggaattgggattttgagttttagtttttttattttgaaatagtagttattttatttgtttcgtaggattgttgtaagaagttaggtaggaggttgaaaagttttggagtatatgataggtgttatagaaacgttcgtttcgttttttgattagtatttaatagtttgggagtgttttaggtgtggttgagggtggttatggtttgataattattattagaatattttttttttttttataaaatgttttgaggagaatttaatggttgtcgaaaattaaggtaagttttatttttaaaatatttaggagttaat

SEQ ID NO: 197 - DNA, 2493 bp, Artificial Sequence
  chemically treated genomic DNA (Homo sapiens)
attgatttttgaatgttttagaaatgaagtttgttttaattttcgatagttattaaattttttttaaggtattttgtgaaaaaaggaggggtgttttggtggtggttattaaattataattatttttagttatatttggggtatttttagattgttggatgttagttaggagacgaaacgaacgtttttgtagtatttattatgtgttttagaattttttagttttttgtttgattttttgtaataattttgcgaggtaggtggaatagttgttattttaaagtgaggaaattgaagtttaaagttttaatttttaaagggaggagttgaagaagagcgttagttttattttattttttcgtgtttttttagaaggaagaggttattttggtagttttttatttttagaattttgtttttttcgttttttttttattttgattgttggggtgtttatatataggggttagtaggaaatagagataaaggggagaaggtgtaaatacgagtagggaggaaaatttggtataagttggatgtgagaaggattggcgttgtcggggacgttagggttggtattaagaatagaggagacggtgaaatgtggttttgttttttttttagttttagaagggtcggtttgtttttatttttagagttcgttgattaatttaatagttgtttattaagtatttaatgtgtttttagtattttaatgggtattgggaatatagtagttattaaataaagttttttttttttcggagtttatattttaggggagtttttatttagcggttttaggtagttttttggaggtttagaatgagggtgttttttgtggtttttttggatacgtataagcgtagatatatatgcgtttatataagtgtgtatttatatgtatttgttcgcgcgcgtatacgtattgtttcgttttgtcgttttttttttagttaagtatttgaagtagaggcgtagcgcggatgattttgaatatgtgcgcgaggagtaggttaatttcgaggtagttattagcgttttaaggttcgcgtagtcggcggggcgcggggcgtagttgggcggtgtttttgggagggaaggaggttgcgcggagttttcggagttttagtttcgggtagttatatttgttcgcgttcgttttcgggtatagcggggttttttttttaggggtttgcggtggagtaggcggtgttaatttttttaggttttcgttggtttatattcgttattcgtttttgttttttagttttatagatttatacgggtttttttttttaggtatggttacgttgattgattttttttttttttattgatttttggggtttagtttggagggagaaaagtgggaaggtgtttatttgcgttagttttggtgtttgggtgagatataggtggaaaataattatagggttttttggaaatagtttcggttttggaattgtggtagaaatttggattcggtggtttgaaattaggttgaggagtatagttaggtagtgcggatttgtttttcggggttgattaattagatatttttttttttcgaagttttttggttggttgtttgtttgtttttaaggttagtaatcgtttattattattttttatatatgttttttttaaggcgaggttgcgcgtaggatggcgtgtatttttttttttttttttaattttttttatgtttttttaatttttggtagataattttttattaggttatttttttttttttgggttagttagtattttcgagaagtttttttgtggttatgtttatttgtttgttttttttaggagaaagagagagtggtagggtaggaggagggtttttatttttataggatagttggtttagttttgtagagtttttgtggttgggagggtgtgtgttagggttttatggggttagggtataggtaggttttttaggtaggtgggtttgttttagttttattttgtattttttgtggattaacgttaatagtaagagatttatatagggtttgtttttttttttttgttaggtataagagaattttgtatttgttttttgtttataatttcgttgaagaagtggagaggttaagtaattttaaggttgtttggaaggagagttgggttttgttttttgggagagttggaggatattttttttttgtggagtgtgaagggaggattgttttattttttgtttgttagtgtttgtttttgggagttagtgtattttattttttttaattttcgttggtttttaggggtacgtattattattttattttacgggtgaggagattgagttttagagagttgtttttgtatagttgtaaatatgggaggtcgaataggatgggttatattatttgtaattagttttatggttaataggaatttatttttttggtttttgtaaagcggtggataaggttgggaattaggatgttttttttttattttagttatgttagt

SEQ ID NO: 198 - DNA, 2346 bp, Artificial Sequence; identical to SEQ ID NO: 188
  chemically treated genomic DNA (Homo sapiens)

SEQ ID NO: 199 - DNA, 2346 bp, Artificial Sequence; identical to SEQ ID NO: 189
  chemically treated genomic DNA (Homo sapiens)

SEQ ID NO: 200 - DNA, 2494 bp, Artificial Sequence
  chemically treated genomic DNA (Homo sapiens)
tttttatgaagttataaagttgtaatttcgtttttatgtgtagtattataggttttgtttttaaatatttgtaggtgtatttttttgtattcgttaaattaagggttttttttttttgtgttagattcgtttttacgattacgttttttatttgatttatagaaagggttttacgatcgttaggttatcgtcgtttttgtattttattggggagtcgaaggttttagcgttgttcgcgatttttttaaggtggtcgggaaggttttaattacgtttttttgtaaattagataaggaaggtttggggatttcggtcgcggaaaggtatagaggaggtgaacgtttcggatgtttaagtgacgtatttgtaggcggattcggaaattcgtgtttttgagtcggaggcggagtttttagatttagatcgattttttagaatcgggcggttttgttcgaggtatgaaggttttttaggttcgtttttaaaagttgtgtataatggagatttttggaataggtatatatttttattgtaattagaacgagatgtaatatttaagacgtagggtagggttttggtaaagatacgttgggggaacgtgaaagaaagggttaaaattacgtagttggtttttagagattaaagattacgatttttagtatttaatgtagtgaatttttaggacgttgtatgtcgggagttgtagttttttattatcgttattttttcgttttttcgttatttgaaagggttttaggggatttgtaatttttttcgtgtgtttttttttttcgagaagcgtcgttatacgagaaagttggtcgcgaaagtcgtgttggaattatttttaacgaaattttaggtatagatgggaaagggtgaagaatacgttgttatggttatcgttttttcggttacggaataaacgttttttaggattcggaagtagtttcgtcgcgatttttttaaaaggatggatgtgttttttgtttatatttattggacgtttttttttagaggttaaggtcgtttaggtaaaggggcggttttacgtgtgaggggttcgcggagttatttgattggagaaaagttgtaaattttgattaatcggaaggagttacgtttcgggtatcggttatcgtatttggatagtttcgattggtggattttcgttttttttacgaatttttattgggtgtcgtgggtgcgtggtgcggcgcgattggtgggtttatgtttttcgtttttcgttcgcgagaagtgggggtgaaaagcggttcgatttgtttggggtgtagtgggcggatcgcgcggttggaggtgtgaggattcgaatttaggggtggaggcggtttttgcgatcgaaggggatttgagatttatcggtcgtacgttatgagggttttgtgggtgttgggtttttgttgcgttttgttgattttcggtgagtgattttggaggagtagacgttttttttttatatacgcggtcgtttttcgaaggttttgggggcgttgaacgtgggaggggggatttcggggtttgcggtgggttaagggacgttattatttttcgaaagagggtaagggaattacgtttatttttttttttttttggaaataaaaaaagagagtaatattatttaattgttttatagatttaatagtatttcgttcggaggttttagcgatttcggggtggggtttttttgaggttttggttttttcgggagttgtgcgagtttttttttttttttcgttcggaggattttttcggttatcgtaattttcggttattttagttttttcgttttttaattttttagatttcgatttttcgtaagttcgtgtttttttttagatgttggtttcgggagcgtgaggtttggggttagcggaatggtagtgttagcgtgtttgatttagttttgttggagttcggtttttaatatttttttttttttttatgtttttgggtttaattttagtttttttcgttagaggttgtataaattttatttgtattttgatttgtgttaacgaaggtcgaagttttggtttgattagttgggaggttttggttcggtttgcgcgtaatacgtgtgggtgtagaagaggtttggtattagtttgtttaacgttatttataaatgatcggagatatattgtttagaagtggtgattgttttcgtattttaggatttattggagattttagtatttgaatttaaatagatgttttgttttggttttatttttggtatttaaattagggaatgtatttttttatttttattttttttagttattaattgaattttgtaatttttatttttttttatttgattattttttttggagaagtgtgatgttgaagagtttgttcgtgttaaatttttagggtcggttagagttgacgatgaagttgatgtggatggtatagtagaagaggatttgggtaaaagtagagaaggattaaggacggatgatgaagt

SEQ ID NO: 201 - DNA, 2494 bp, Artificial Sequence
  chemically treated genomic DNA (Homo sapiens)
attttattattcgtttttgatttttttttatttttatttagatttttttttattgtattatttatattaattttatcgttagttttgatcgattttgaagatttaatacgggtaaattttttaatattatatttttttaaggaggatgattaaatagggaagggtaggggttgtaaaatttagttggtaattaagggaggtggggatgaaagagtgtattttttggtttaaatattaaaggtaaagttaagatagaatatttatttaagtttagatgttgaggtttttagtagattttgaaatacggaggtagttattatttttaaatagtgtgttttcgattatttataaataacgttaagtagattgatattaggttttttttatatttatacgtgttgcgcgtaggtcgagttaaggttttttaattgattaagttaaaatttcggttttcgttagtataggttagaatgtaaataggatttatgtaatttttggcgaggggaattgaaattgagtttagaggtatgagaagggggagaaatgttaagaatcgaattttagtaaaattgaattaaatacgttgatattgttatttcgttggttttaggttttacgttttcgaggttagtatttaagaagggatacgggtttgcgaggagtcggagtttggggaattaggggacgggaaagttgggatggtcgaaggttgcggtggtcgaaaaagtttttcgggcggggaggggggaggggttcgtatagttttcgggggagttagagttttagagaggttttatttcgaggtcgttgagattttcgggcgagatattattagatttgtagggtagttagatgatgttgttttttttttttatttttagaggaagaagagaataaacgtaatttttttgttttttttcgaggaatggtgacgttttttggtttatcgtaggtttcgggatttttttttttacgtttaacgtttttaggattttcgagaagcggtcgcgtgtgtggaggggggacgtttgtttttttagaattatttatcgaaggttagtaggacgtagtagaggtttagtatttatagggtttttatggcgtgcggtcggtgagttttaagtttttttcgatcgtaggagtcgtttttatttttgggttcggatttttatatttttagtcgcgcggttcgtttattatattttaagtaggtcgggtcgttttttatttttatttttcgcgggcgggggacgggaaatatgaatttattaatcgcgtcgtattacgtatttacggtatttaatgaggattcgtgaggggggcggaagtttattaatcggagttgtttaggtgcggtgatcgatgttcgaagcgtggtttttttcgattggttagggtttgtagtttttttttaattaaatggtttcgcgggttttttatacgtgggatcgtttttttgtttgggcggttttggtttttaagggaaaacgtttaatgaatgtaagtagagaatatatttatttttttagagaggtcgcggcggaattattttcggattttagagagcgtttatttcgtgatcggggaaacggtagttatggtaacgtgttttttatttttttttatttatgtttggggtttcgttggaagtgattttagtacgattttcgcggttagttttttcgtgtggcggcgtttttcggaaagaagaaatatacgagagaggttgtaaattttttagaatttttttagatggcgggggggcgggggggtggcggtggtgagaaattatagttttcggtatgtaacgttttaggggtttattgtattgaatgttgggggtcgtagtttttggtttttgaggattagttgcgtagttttggtttttttttttacgtttttttagcgtgtttttgttagagttttgttttgcgttttagatgttatatttcgttttgattatagtagagatatgtgtttattttaggagtttttattgtatatagtttttagaagcgggtttagaaagtttttatgtttcgggtaaggtcgttcggttttggggggtcggtttgagtttgggggtttcgttttcggtttaagagtacgagttttcgaattcgtttataagtgcgttatttgggtattcggagcgtttattttttttgtgttttttcgcggtcggaatttttaggttttttttatttggtttatagaagaacgtggttgggattttttcgattattttagggaaatcgcgagtagcgttgaggttttcgattttttaataaagtataaaggcggcggtgatttgacggtcgtagaattttttttgtgaattaggtggagagcgtggtcgtaaaagcgggtttagtatagaaaaggaaaatttttagtttaacgagtgtaggaggatgtatttgtagatatttgaaagtaaaatttgtggtgttgtatatgagaacgggattgtagttttgtaattttatagaaa

SEQ ID NO: 202 - DNA, 2196 bp, Artificial Sequence
  chemically treated genomic DNA (Homo sapiens)
tttttttttttttttttttttttattagttatattggtttatttagaattttataaattaattttgtttatttttaattttttaatattgtttttgagattgttttattagaaaagtttttttttttatttatttcgtttaataatttttatttattttaatttttttgtatttattgtttttaggaatttggtatttaggatatttttgtttttatattgtttatgtatgtatatttcgtttttaataaaatatttagttgtttaagggtaagggttttatagagttttaatatgttaacggtttggtgttgtttaataatttagattttgacgggttttttttagggaggggagtaaagggtaaattattttaggggttgggagtgtagaagttaaatttttgagattgtgaaaagaagacggcgtcgagacgatttagtagtaggtatttaagtaagaaaaatttaaatattgtttttaataatgtttgattaatgttaaatattaagtaagggtttaggtagttttgatagtttgtagtgttttaggataaaattaattttgaggggtgttagtttacgataattttttgttagggttttggatacgttttgttttttcgaaggttaacgggttgtttttgcgcgtcgaggtttcgtttcgcggttcgtcgattggttttagtcgtttcggcgttaagatttaattttatattacgcgtttaggttacgtttatttgttatgcggttttggaaattgtgagtttggggattgttgtgtttattaatcggatttagaagggatttttttgttcggttggttttcggtttttttgtttattttcggataaattacggggtttttcgcgtcgtttatggcgtttttcgttcgtttcgagcgtttttttttttttcggcgtttttttgggttgtttttggcggttttggtgttgttgttgtttttttttttcggtaggatttcggggtggattcgcgcgttcgcggcgaggttagagttttgtttagttagtcgggtaggaggcgcggggcgaagtttattgtacgtcgtgtttgtttgggatagagagcgaggttagggtttttcgaggggtgtcgtgtttagatttcgggggtatgtggcgggggatgcgggaattacgtagaagtttgtttggtggtatcgtgtgcgcggtcgatatttacgtaggatttggttgcgtttttaaaagaagcgtgaatcgtgttttcgggattgagtttagttagtaaggggagggtttattgggcgttttaggtgagggtttgttttggagtgtataggtgcgtgggattgttgttagagttcgtgttgtgttcgtggtgagagtttgttttgtgtttttttggtgttttggtgagtagggtgtttattagggtttggatagtattcgcggtaagggttgtagtgcgtttgttgtgttttatgggttgggttggtttgggttgggttgggcgagtaggggtttggttaggtgttgttgggagcgtgttgtgcgtaagtggtttgtgtgcggagtttattgtgggtaagatagtttattgtttgttttgagtggagcgagcgcggattttgcggttagggagggtatgttgagtgagagtaggtttttagtgtttggggttagagaggtggtaagggcgtattatgtttttagtgttttttgtgaatagtgttcgtgttgtttgagatcgtattggttttgaattttaagtggttgtttttttggggggtgggtgggttatcgagttatttttttgtttttaattaatatagatagtatttgattttattgtttagtggttttttgatattgttttttttttttttattagtttgagttatatttgagagatgtgaagtaatttaaaaaatattggtagttaaatttagtgagaaattagtattttaataaaggaaggtagataatgttaattttgtttttttttatagtttataaattgaagtttaaggtttattttattgttttgtattttattgaatggaattaatatttttaaaaatgtatgttaggttaggtttagttgtttatatttgtgattttagtattttgggaggtttaagttgggtgattgtttaagtttaggagtttaagattagtttggataatatgttaaaattttatgtttataaaaaa

SEQ ID NO: 203 - DNA, 2196 bp, Artificial Sequence
  chemically treated genomic DNA (Homo sapiens)
ttttttgtagatatggggttttgatatgttgtttaggttgattttgaatttttgggtttaagtaattatttaatttgggttttttaaagtgttgggattataggtgtgagtaattgggtttggtttagtatgtatttttaaaaatattgattttatttaatgaaatataaaatagtgggataggttttaagttttagtttatgagttgtaggggaaaataagattaatattatttgtttttttttgttaggatattaattttttattaggtttggttattagtgttttttaggttgttttatattttttaaatatgatttaaattaatgaaaagaaggaaaataatgttaaaaagttattaggtaatggaattagatattgtttatattggttgggaataggaagatgattcgatggtttatttattttttaaaaaagtagttatttaaaatttaagattaatacgattttaggtaatacggatattgtttatagaaggtattaaaagtatggtgcgtttttattatttttttaattttaggtattgagagtttgtttttatttaatatgttttttttagtcgtagagttcgcgttcgttttatttaaagtaaatagtgagttgttttgtttatagtgaatttcgtatataggttatttgcgtatagtacgtttttagtaatatttggttaggtttttgttcgtttagtttagtttaggttagtttagtttatggggtatagtagacgtattgtaatttttatcgcgggtattgtttaagttttaatgaatattttatttattaaggtattaagggaatatagggtaaatttttattacgggtatagtacgggttttagtaataattttacgtatttgtgtattttagagtaagtttttatttggggcgtttagtaagttttttttttgttgattgggtttaatttcgaaaatacgatttacgttttttttgggaacgtagttagattttgcgtaaatgtcggtcgcgtatacgatgttattaaataagtttttgcgtggttttcgtatttttcgttatatattttcgggatttgagtacggtatttttcggagaattttggtttcgttttttattttaagtaggtacgacgtgtagtgagtttcgtttcgcgttttttgttcgattgattgagtagagttttagtttcgtcgcggacgcgcgaatttatttcggggttttatcggagaaggaggatagtagtaatattagggtcgttagaagtaatttaggaaagcgtcgggaaggaaagggacgttcgagacggacgggaggcgttatgagcggcgcgggagatttcgtgatttattcggaggtgagtagagaaatcgaaagttagtcgagtagggaagttttttttgagttcggttagtggatataataatttttaaatttatagtttttagggtcgtatgataggtgggcgtggtttgggcgcgtagtgtgaaattgagttttagcgtcggggcggttggggttaatcggcgggtcgcggggcggggtttcggcgcgtaggggtagttcgttggttttcgaggagatagggcgtgtttagagttttggtagggggttatcgtgggttagtattttttagggttagttttattttggggtattgtaggttgttaggattgtttgggtttttatttggtatttggtattagttaggtattattgggaataatatttgagttttttttgtttgaatgtttgttattgaatcgtttcggcgtcgttttttttttatagttttaaaggtttggtttttgtatttttagtttttaagataatttgttttttgtttttttttttggagaggattcgttagaatttaaattattaagtaatattaggtcgttagtatattgagattttatgggatttttgtttttgagtaattaaatgttttattgaagacgaaatatatatgtatgaataatgtaaggataagggtgttttaagtgttaaatttttggaagtaataaatgtaggaggattgggatgggtagaaattgttaggcgaagtggataagggggagaatttttttggtgaaataattttaggaataatgttggaaaattaagaatgagtaggattgatttgtagggttttgagtaagttagtatgattggtaaaagggggaaaaaaaaagggaa

SEQ ID NO: 204 - DNA, 2355 bp, Artificial Sequence
  chemically treated genomic DNA (Homo sapiens)
gtagaaaattcgggtattagtagtaagattcgggagatatttaatcggaaagaaataaaaaattattagtttttcgaagttatttttattttgaacgttgttcgttaagagaattatttattaaagtttttttgtagtagtttttataaaagttttattttatttagtaagaaagcgtttcgttttaaatttaaataaattttatatagatgaggtttcggaaattattagtttgattttttatgaagatagttagaggtggataaattaatagattcgttgaaatatttattttttgtaaataggtttgagaattaattaattagaagtggataaaaagtagggattttagaaagatgatttgatatattttattgattttttttggaatgcgatttttaattttttattaagagtttaaaatggttattagttaggatgggtttgggtgaggaatcgaattataatttattttaattttcgatttggtcgtttgttgttattaggagaaatggggtagagagggagggtatcgtttacggagttttatttcgtatgtttcgattttttttcggcgtttttttatttcgtttttattttgatcgttcgcgagggagacgtcggtcgatggattcgtatttgtttttatttttcgtttttttcgggcgatttttttatagtttcggattttcgagaaaggggaagggagacgtgtgtatacgggggttttcgggatcgcggttttgtagttgtcgtttcggtttttagcgttggtcggcgattcgaggcgcggttcgtatttatttgtagtttcgtttttcggtggcggtaatatttagcgatgtttttgtagtttttgcgggtcggcgttagttttatcgttttcgtatcgtttttaagatgttaattcgtcgttattatttaggggtatagggaatcgaagtttggtgttgtgtgatcgtggagggcggcgtgtgagtgtggttttgagcgtgcgagtgtgcgcgcgcgtgtgtggatgtgttttttttttcgatggtaaagacggtttaggaatttgatatttaagttggaatttttttgaagcgggtgaaggtgagtttgattttttttttcgtttttttattttatagtgttaaagtaattaaaagatttgtttattgaggaaaagttaaagtttcgtagtttttggtagcgttcgcggtcgttttttgttttcgtcggatgcgcgcggtgcgtttagttttttggattgtaagaattaaggcggttttgttgtaattatcgtttttattttatttttgatttgtttgtttttaaggtcgattaaagattttttttttcgttttacgtcgttttttttttttatatatatatatatttatatatttttcgttttttttttttcgtttttttttttgttttttggggaaaggtaattggatagaatgatttatttttaggaaagtagtttcggttacgtatttttcgagttttttggttttcgtaggtatcgggtttttaacgtggcggagttgttgggaagttcgggataggaaggaggagaggttttgagtttagtcgatgttttttttttagacgttcgcgttttttcgtttaggtgtttttgtttttattgttcgtagataggttttcgttggtgttttcgcggagatttggcgttttttattcgaatttatttagtagtaatttttggttagttttagttttttaatttcgtttcgaagtgttgcgggtagagttttacgtagtttattcgttgtttttttaggtatcgtgggttggaaggaagggaaattcgtcgatgtttttttggtagtagtgttttggtatcgttattatcgaggaggtgcgagttttaatatcgaatataagcgagtaggtgtcgtttgtgttattttgttaaaggcgggaggggagaaagaaaggagcggggggagggggtcgaggaaataaatttagattatcggcggagaaagaagtcgtttagtaagtaaagtttttttttcgcgttttattttagatgttatattgttaaaagatattgatgttaattttttagaaagtcgttataaagggtagagtttttgttttattttagaattttattttatttagtttggttgtttagtgagtatagagtgatttggttttttcgtatagtgtagcgagaatgtaggagaataggttttgatattttaggttgagttaagtagtaaaatggaatggtagggtcgggcggcgttgtttcgttttttttttttaatagttagttttgttagttttagtaattgtcgttgagagtaaataacggttttgtagaaaaagaacgag

SEQ ID NO: 205 - DNA, 2355 bp, Artificial Sequence
  chemically treated genomic DNA (Homo sapiens)
ttcgttttttttttgtaggatcgttgtttgtttttaacggtagttgttggggttaatagaattggttgttgggagagagaggcgaggtaacgtcgttcggttttgttattttattttattgtttaatttaatttggagtgttaggatttatttttttgtattttcgttgtattatacgggggagttaagttattttgtatttattggatagttaggttgggtggaatagggttttagagtggagtaggggttttgttttttatggcgattttttaaaagattagtattagtgttttttgatagtatagtatttggggtgggacgcggagaggaggttttgtttgttaaacggttttttttttcgtcggtgatttggatttgttttttcggtttttttttttcgttttttttttttttttttttcgtttttagtaaagtgatataggcgatatttgttcgtttgtgttcgatgttggaattcgtattttttcggtggtgacggtgttagggtattgttattagggggatatcggcgggttttttttttttttagtttacgatgtttagaagggtagcgggtgggttgcgtggggttttgttcgtagtatttcgaggcgggattgaggggttgaagttggttaggagttgttgttaagtggattcgagtggaaggcgttaagttttcgcgagggtattagcggggatttatttgcgagtagtgggaataggggtatttggacggaggaacgcgggcgtttggaggggggatatcggttgagtttagagtttttttttttttttgtttcgagttttttagtaatttcgttacgttggagattcggtatttgcgagagttagggaattcgagaagtgcgtggtcgaggttgtttttttgaaggtgaattattttgtttaattgtttttttttagagaataagagggagggcgggagagagggaacggaggatgtgtgagtgtgtgtgtgtgtgagagggagagacgacgtgaggcgagaggaaaagtttttagtcggttttaaaagtaaataaattagagatggaataagagcggtaattgtagtaagatcgttttgatttttgtagtttagggagttgagcgtatcgcgcgtattcggcgaggataggaggcgatcgcgggcgttgttaagggttgcgggattttggtttttttttagtaaataaattttttgattattttgatattgtggaataaagaagcggggagaaggattaggtttatttttattcgttttagggggattttagtttggatgttagatttttgaatcgtttttgttatcggaggaggaaatatatttatatacgcgcgcgtatattcgtacgtttagggttatatttatacgtcgttttttacgattatatagtattagatttcggttttttatgtttttggatggtgacggcggattggtattttggaagcgatgcgagagcgataaggttggcgtcggttcgtaaaagttgtaggagtatcgttaggtgttgtcgttatcgggaagcggggttgtaggtaggtgcgagtcgcgtttcgggtcgtcggttagcgttggggatcggagcggtaattgtaggatcgcggtttcggaagttttcgtgtgtatacgtttttttttttttttttcgggggttcgggattgtagagggatcgttcggggaaggcgagaggtgagggtagatgcgggtttatcggtcggcgtttttttcgcgggcggttagggtaggggcggagtagagggacgtcgagaggggatcggagtatgcgaaatgaggtttcgtgagcggtgttttttttttttgttttattttttttaataatagtaaacgattaggtcgaggattgaagtgggttgtaattcgattttttatttagatttattttggttggtaattattttggatttttaataaggagttgggggtcgtattttagggaagattaatgggatgtgttaggttatttttttgaaatttttattttttgtttatttttgattagttaatttttaggtttgtttgtagaaggtgggtgttttagcgagtttattgatttatttatttttaattatttttataaagaattaagttgataattttcggagttttatttatgtaaggtttatttagatttgggacggggcgtttttttattgaatgaaataaagtttttgtaaaggttattataagagagttttagtaaatgatttttttaacgaatagcgtttagaataagaatggtttcgggaaattaatggttttttattttttttcggttagatgtttttcggattttgttattagtattcgggttttttgt

SEQ ID NO: 206 - DNA, 2192 bp, Artificial Sequence
  chemically treated genomic DNA (Homo sapiens)
ttatataatttttaaaaagaaagaaatttttaaattatagatgtgtttggaattagaatttagaaagtatttgggtagggaaaatagtttttagtgtttaaggttaaagttagtagggtttttttggatgggaaagagatatgagattgtaagtaatttttggatattatttatttgttattgtgtttttatttttttttttagttatttatacgttttttttttttagttaaaatgaatttaatttttgttatagtattttattttgttaataaaatttaggattgaagaatgagaataaaagggttttatatttattattttttaatttttgattttagtttggatagaataattatttattttagaaaattggtatagggagtatttattagtagttgtaatatattattgttaaagggagggattttgtaaggcggtattgggtgttttatatgtatgggaaattcgaggttacgtttagtgttaattataagtatttttatttttggttaggtaagttttgatttttgaattttgagtttttaattttttttaaaatgagaaagagatggttttttttagagttttttagtttttaatttataggtaaatattatcgtatgttgttttttagtagagattggttttaattaaggtaaataagttaggatggattttgttgatcgtgatggtttagtgttatattttatatattttattattttttagaatatttaatagtgttgtttttggtagttttggggttgtagtttttgtagagaggaggaattggtattgaaagaaatagttgagttttattacgttacgtggggcgtttttattgttaagagtaattttttttttttgggaagaaaagcgtgggcggggtcggggtagtttttttttttcgcgttgttttggagattatgggcgtttagttgtagttgtcgttggatcggttttggttgttttgagaggtgttttttgtaggcggggacgcggttaggtcggacgtaaggtttttttttaatttatcgggtttagggggacggttaggggttgtttagtttatttggcgggttagggagggggatggtagaggttggttgggtttttttagtatatagtaggcgtttaattagcgtgatttgaattaggttattttttttttttaatttttttttttgtgttttatggagggtggattagggtttcggatgcgaattttgcgtcgtattagagttttagttttaatcgatattttgagcgtcgttaattttttttcgaagagtatggtagagtgaagtataagtaataattttgtattattcgcgtttttagagttttttcggatttgcgttatgcgcggcggggagaatcggttttttgttcgagtttagagtttatttgaggttagttttatcgtttcgttgaaagttaaaattttaagtcgacgttttttagtcgtttattttttagtagagagttttttttcggggagttttgttttggggtgtcgtttcgaggttagacgtcgtttcgtttggatttgaatttgagtttgggacgggcgattttttaattttaggaattggaattgagatattaaagtttagacgcgttttttggacgacggtttttcggtaggggtatttagttagcggttaagatgtcgttagtggggaaggtgatttaggtttcgaatgggaaagtttattagtagattttttaggttgaggtaggagtcgttttttgtttcgtttttttttatttttttttttttgtttttttttaaattttttttttttttagggtttttttattggaaattgaataaaataagggttttgaaattattttgattttaaaaataatttttgtttgtttttaaatcgtattaatataaaattagaatgttagtttttgaaaattagaaaatttaaattaaaattttaaatgtaaattatttagaaatagtttggatggaattattgggtgatttttgttttttttatgtataaaaatatgattaatttttgtatttaaaaaataggttttattttgtattagtgttttgaaatttgttttttttttataatagtattttatagatttttttttatgttcgtgggcgtttatgtattttattatattgagtagttttttatttgttgatttaggatttttat

SEQ ID NO: 207 - DNA, 2192 bp, Artificial Sequence
  chemically treated genomic DNA (Homo sapiens)
atgggagttttaggttaataagtggggagttgtttagtatggtgaaatatatgggcgtttacgggtatagaaaagggtttgtgagatattgttatgaagaaaaagtagattttaaaatattagtatagaatgaaatttattttttaaatataaaaattagttatgtttttatgtatgggaaaaatagaggttatttagtggttttatttaggttatttttgagtaatttatatttaaaattttaatttaagttttttaatttttaagaattgatattttaattttgtattggtacgatttaagaataagtaagaattatttttaaaattaaagtaattttaaagtttttgttttatttaatttttagtagggaagttttgggagggagggaagtttggaagaaagtaagggaagggggatggagaaaagcgggatagagggcggtttttattttagtttggaagatttgttggtaggtttttttattcggaatttgggttattttttttattgacgatattttggtcgttggttggatgtttttgtcgggaagtcgtcgtttaggaaacgcgtttaggttttggtgttttaattttaatttttgaggttgggaaatcgttcgttttaaatttaggtttaggtttaggcgggacgacgtttggtttcgaggcggtattttagggtaggatttttcggggaaggattttttgttggggggtaggcggttggggaacgtcgatttagggttttaatttttaacgaaacgatgaaattaattttagatgagttttgaattcgagtaggaggtcggtttttttcgtcgcgtatggcgtaaattcgaagggattttgggaacgcgaataatataggattattgtttgtgttttattttgttatgtttttcggggaaaagttaacggcgtttaaggtgtcggttgggattggaattttaatgcggcgtagaattcgtattcgggattttaatttattttttatgggatatagggaggagaattggagggagagagtaatttgatttaggttacgttaattaggcgtttattgtgtgttgagaagatttaattagtttttgttatttttttttttagttcgttaagtagattgagtagtttttggtcgtttttttgagttcggtagattggagggaggttttgcgttcggtttggtcgcgttttcgtttgtagaaagtattttttaaggtagttagggtcggtttagcgataattgtagttggacgtttatggtttttaaggtaacgcggaggggagggattgtttcggtttcgtttacgtttttttttttagggaggggagattgtttttagtaatgggagcgttttacgtggcgtagtgaaatttaattattttttttaatgttagttttttttttttataaggattataattttagggttgttaggagtagtattattaaatgttttgaaaggtggtaggatatatgagatgtagtattgagttattacggttaataaagtttattttaatttatttgttttggttaaaattaatttttgttgggggatagtatacggtagtgtttgtttgtaagttagaagttgaaagattttggaagaaattattttttttttattttaaaagaggttgagagtttaaaatttagggattaaggtttgtttggttagagatgaaaatgtttgtggttggtattgaacgtggtttcgggttttttatatatatgagatatttagtgtcgttttatagaatttttttttttggtagtgatatgttataattgttaataaatgttttttatgttaattttttagaatgagtgattgttttgtttagattagaattagaaattaagaaatggtgagtataaaatttttttatttttattttttagttttgggttttattaataaggtgaagtattgtaataaagattagatttattttagttggaaaaagaaaacgtgtaggtgattgagggaagggatgaaaatataataataaataggtaatgtttaggaattatttgtagttttatattttttttttatttaaggaggttttattggttttggttttgaatattagaaattattttttttatttagatgttttttgggttttggttttaggtatatttgtaatttaggggtttttttttttttaaaaattatatgg

SEQ ID NO: 208 - DNA, 2315 bp, Artificial Sequence
  chemically treated genomic DNA (Homo sapiens)
ttgtatttggcgtgaggttttttggttacggacgttgttggcgttatatttgtggtatttgaggtgaattgtttagatggaaacggtattattaggtaattggtaatagaagtttaaagttttgggtgttttaggttagaggaaggaaggaatgtaagggtttcgttttttttaatgttaggagcgtgtgtttatagttttagataggataatttattgtaaatttaaagtagaaaatatggtttaattttatttttgtggtatttttatagatggtgtttatttgttttggtagtgatgatcgatattgcgaacgttgtgttggtagtgtgtttaagggttttaattgaattatttcgatggagttgaaatttagttttattttatagaagagaaaattgaggtttagagagattaggtgttaagttttatgttaagtatagggaagtaaaaataggatatatttaatataaggtggttttaggaattagtggttaggatacgggaggtgtgttgagcgtagatgggtagatgtaagttgaggtggtttgttggagggttttggattttttagaaaagaggatattagttgtttagggagggaaggtttgagatggattttggttggtgtggattagtttatggtgtgtttgtaggtagggatattttgaatagatatgggttgaggggagtttgtgtggagcgtggttagtgaaggttgggttggtcggtagggttcgttggttatgggaggtttggtttgtagtagtagggtttattaaagatatggggatggatggttgatggataagatggttgatggatagcgttttagaaggtcgtaggtttgtttaggttgaggttagggagggttagggtttttagggaaggagagtaagttaggggagttttttgtatagaagattttttatttgaggtcgttttttaggagtttagttatttcgtggagagtttggcgttgattgtggaagaggtgatggacgtgcgtcgtgtgttggtgaaggtcgagatggaaaagtttttgtagaataaggagttttttagtagtttgaagaaggggaaggtgaggttgtttagacgtggggttacgtttttgttcgttgggttaggggcgggtgtcgagagggttagtttttaggattgtttgtttatgatttggttgggagttttgagggggtagtagggatagggcgggattttagggagttttggataaagcggggttttaattagttttttttgatagatttgttgttgttgtcgggttaagttttcgttgttttcgtggtcgtttagttgttttttttgtaagaggtgagttttttttttagttgttagtttataagggaaggaggaggcgagaaatttcggggtagtatcgtttatagaattttttgtgattttaggaatgttttagtatgttcgatggttgatgagtttataagatatggttagtacgaatgaggagttaaattttaaattgtatttaaattaaattaaatttaaatagttaagtaatttttagttttagttaagatggggtaataggtattttttatagttaagaataaataggatgtgaaataatggtttttaagatagtaggtaataaaaaggaaatataacggggtaagtttgttattattatagttattgtttggagagtttttaggttatgagttatagttgtcggattttttagatggaggaggttaggttgagaatttagggagattatagtagttcgagttcgtcgtgtagaattttagaggagagggttgcgtcgagaaagttttagagaaggtttttttttttgaaggaaatgattgaaggttgtagaatatttattttaaagtagagattggtagattatagttacgggttaaatttggttttcggtttgttttgtaagtaaaattttattggatatagttatatttatttattattcgtttagttacgtttaaaaggtttattttttggttttttatataaaaaatttatttttttttgttttaaagatttgaagggacggtgtttaggggtaggaatgagtaatatcggtttttatcggttataggtagaaatgttataatttatagggtattaattggaatgtatataaaggattcgttttattaacgtggagtaagtagtttaaagtgattgttgttttaggtttgattgatatattataaaagtaagatttgaaaggattaaattgtttataagtattttaattgattttgagaataaagtttaagaataagaattttttaaatattaataaaaaa

SEQ ID NO: 209 - DNA, 2315 bp, Artificial Sequence
  chemically treated genomic DNA (Homo sapiens)
ttttttgttgatgtttaaaaaatttttatttttgagttttgtttttagaattagttaagatatttgtgaatagtttgatttttttaggttttgtttttatgatgtattagttaggtttagagtaataattattttgggttatttattttacgttagtgaggcgagttttttgtgtgtattttagttagtgttttgtgaattatgatatttttgtttgtggtcggtggaaatcgatgttatttatttttgtttttgagtatcgtttttttagatttttagaataagggaaggtaaattttttgtgtaaagggttagagaataaattttttaggcgtggttgagcgagtaataaatgggtgtggttgtgtttagtgagattttatttgtaaaataggtcgaggattagatttggttcgtggttatagtttgttaatttttgttttaggataaatgttttgtagtttttagttattttttttagagagggggattttttttgaggttttttcggcgtagtttttttttttggagttttatacggcggattcgagttgttgtggtttttttggatttttagtttgattttttttatttggggagttcggtagttgtggtttatgatttagaaattttttaggtaatgattgtggtgatggtaggtttgtttcgttgtgttttttttttgttgtttgttgttttgaaaattattgttttatattttgtttgtttttggttgtggaagatgtttattattttattttggttgaaattgggagttgtttagttatttaaatttaatttaatttaaatataatttaaaatttaattttttattcgtattaattatattttgtggatttattagttatcgaatatgttagaatatttttggaattataggaagttttgtgggcggtattgtttcgaggtttttcgtttttttttttttttgtgaattgatagttaaagggaaggtttattttttgtagaagagatagttgggcggttacgagaatagcgggaatttggttcggtagtagtagtaaatttgttaggagagattggttagagtttcgttttgtttaaagttttttggggtttcgttttgtttttgttatttttttagggtttttaattagattatgagtaaatagttttgggaattggttttttcggtattcgtttttgatttagcgggtaagagcgtagttttacgtttaggtagttttattttttttttttttagattgttgaagagttttttgttttgtaaaaatttttttatttcggtttttattagtatacggcgtacgtttattattttttttatagttagcgttaggttttttacggggtggttgaatttttaggggacggttttaggtaggaagttttttatgtaggaggtttttttagtttattttttttttttgaggattttaattttttttggttttagtttaaataagtttgcgattttttaaaacgttgtttattagttattttgtttattagttatttatttttatgtttttgatgggttttgttgttgtaggttaggttttttatgattagcggattttgtcggttagtttagtttttattggttacgttttatataaattttttttagtttatgtttgtttaaggtgtttttgtttgtaaatatattatgggttgatttatattagttagaatttattttaaattttttttttttgagtagttgatgtttttttttttggaaggtttaggattttttaataggttattttagtttgtatttgtttatttgcgtttagtatatttttcgtgttttggttattgatttttggggttattttatgttgagtgtgttttgtttttgtttttttgtgtttggtatagaatttgatatttgatttttttaagttttagtttttttttttgtaaaatggggttggattttagttttatcgagatgatttagttaaagtttttaaatatattgttagtatagcgttcgtagtgtcggttattattgttaaggtaggtgggtattatttatgaaggtgttatagagatggagttggattatgttttttgttttggatttgtagtgggttgttttgtttaaagttgtgaatatacgtttttggtattggggggagcggggtttttgtatttttttttttttttgatttgaggtatttagggttttaggtttttgttgttagttgtttgatggtgtcgtttttatttgaataatttattttaggtgttataggtgtgacgttaataacgttcgtggttaggagattttacgttaggtatag

SEQ ID NO: 210 - DNA, 3404 bp, Artificial Sequence
  chemically treated genomic DNA (Homo sapiens)
ggttcgagaacgtttaatcggaagtcgtttttaagtgattcgtgcgttttttttttgttcggttcgttttttggttaaatttttaaaagagcgcgtattttttttcgttcggagtagagtgtcgatttttttttgcgttcgcggaggcgtagtttttcggtttattcggacgttgggggttaggtttaggattttagggtttcgcgtttcggagttttgtgggttaataggtgatgggagaggggttagattgggggcgcgttttgatagatttaggtaacgatcgcgcgggtaaaggttggcgtttcggggttggggcggggtcgtcggaggggcggggcgggggttgttagacgggcgcgttagtcgcgttaagtatttattacgtttttgttagatttgggtattttagggagtcggtggcgttttcgttcgagaaggagtcgggaagaggagagtggttttcgggaagaggagagtggttttcgggaagtattttttttgaggaagaggcggcggcggcggcggtatttacggagagaaaaagtaagtagttgtattttgtttttaagcgttagattttgatacgcgttttttgtagcgatgataattgattaattcgagagaacgtgtataaggaaagtgagggaagggggttttttatttttttttagttatttttaaatgttttaggaggttcggtatttgttttaagcggtttttagcgttagtttttgggtattgcgggtcgtttcggggtttgtgaatttttagaacgttagtttttggtcgtcgttgcgttttagaggcgtcgtcgtttagaagtcgggcgtattcgtcgttcgttagttatagattattatttttttttttattattttcgcgttttttatatattatatttttgtatttaaagaatttaggtttttagaattagaattttttttacgtagtttgtatttagaagagtaaagagaattagatattttggttgtaggaatttttttttttagtgatgtagttatttatagtttaaattttagttcgagtttgcgtgtgttcgcgcgcggggtttcgtcgcggcggtgtaaattttttttttggttcgttattttagaggaattatagtatgttagggttgaaggtttttgatcgttaacgttaggggagtagaaatgtggttttggaggggatgagcgtgcgtttttagtagatgttcgtttttttgtaaacgcgtaatcgttagtttggaggtacggggttttttgaatgggtttagtatttatataggttgtagatgtggaaagtggggttagaaggttaggttgaaagaaggattagaatttggcgtcgggtttgaggggggtttgagcgaattaagaggagtgtacgatgagaataaagaaaaggtgtattaagtttttagaaatagatgaattaaggatttatatgtaagtttttttaatatttcgttcgataattattatgatttaaattttataatagatttttttttttttatatattaggaataagtaattattttttttttgtttttaatagatcgaaaaatgaaatttagatatatagtttgaaagattaggggggcgacgggatgaggggggttggggatgggattgtgatattgtttaaaagtaagagatttttattgatagggtttatttttttttagttttaattataggtatcgaaaggtattttattttttgttaaaggtttaaagaaggaaaatataattatatataggcgtatttgtaatagtttgttaaataaaatttgtttttttttattagaattaatttttagggtttaggtttttggtaaggattgggtattcggattttttaattgttgtattatggggtaaataattggggattttgagtcgtttaggcggtatttttataaattgtatagttttagttcgttttttgtttttacggttcgattaagttcgttgggttgtcgttgtttttatgatcgttgggttcgacgcgtagcgcgcgttgaatggagatattttcggttttcgggtcgcgcgtcgtacgtcgcgttttattttcgcggcgttattgtttcgtgttggcggtcgagcgttaatcgtaggatcgcgtcgtcgttttcgacgtagtgagtattttattagtaattcgagtttttcgagtttatcgaagtttcggtttttttgggaaggtttcgggttttcgttattcgtcggcgggttggcggagacggtaggggttgtattttttagtttttaatttaattttggtcgtagtttttatagaaggcgaataaggagataaggaagatcgagttagagagagatgtgattcgtttgaggtattaagaaataagttcgtcggtagtttttttaattttattttattttcgttgttgtttacgttttttagattgttcgcgttagaaatttcgtattcgtcggatggacggtttcgggtatagggttgtaggcggttcggaatagttttggttcgcgttcgttggttcgttaggagcggttttagcggtgagggggcggggagtcggcgggggagggtcgttcggcgtcggaggcgcggtcggtagcgtcgcggacgagttggtttgtgtaggtagatatttaaataaataagttagaataaattttgtttttttattattttattttttttcgtagtttgcgttttttttgtgtgtgtaaagcggagtagttagatgtagtataaaataatttatgaagggtatcgagtttgaaaaattatggtgtatgagtaggttttattttaggttttagttattttgagtcgtggatttttaaatgttgtttgtttcgaagtagtttttgttttattgtgttttttgtatcgattttttttttcggttttcgatcggttgttttacgtttagttttttttaattttttttttatttttgttcgttcgtatcgtgtttgttgtttgtaagttttcgattgtagatcggtcgtttgttttatattttaataatattaattagggggggagggggcggggtttcgagttgagagttttcgttattcgggttgagtggtaggtatagtcggtttgttaggaggcgatttttagggttaaggggcgggtttcggcgaaatggtcgtttcggttacgggggcggggttcgaggtaggagttaatcggtgtcgagcggagttaggttgttggtttaggattttttttaggttttgagttcgcgttggatgtttagaggagaacgaggatggtagtcgaggtgtgtgttgttttggacgttttgtttttagtaatcgtagttttcgcgtagtagaataaattcgagaataacgtttttaatttatatttttttttatagttgtatttcgcgcg

SEQ ID NO: 211 - DNA, 3404 bp, Artificial Sequence
  chemically treated genomic DNA (Homo sapiens)
cgcgcggagtatagttatagaaaagagtgtaagttgggagcgttattttcggatttattttgttacgcgaaagttgcggttgttaaaagtagagcgtttaaagtagtatatatttcggttattattttcgtttttttttgaatatttagcgcgagtttagaatttggagggaattttggattagtaatttgatttcgttcggtatcgattggtttttgtttcggatttcgttttcgtggtcggggcggttatttcgtcgggattcgttttttggttttgggaatcgttttttggtaggtcggttgtgtttgttatttagttcgagtggcggaggtttttagttcggagtttcgttttttttttttttaattgatattattggagtgtggagtaagcggtcggtttgtagtcggagatttgtaggtagtaaatacggtgcgagcgaataggagtgggggggaaattaaaaaaagttaaacgtggagtagtcgatcggggatcgagaaggggaatcgatgtaaggagtataataaaataaaagttatttcggaataaatagtatttaaaaatttacgatttaagataattgaaatttaaaataaaatttgtttatgtattatggttttttaaattcggtattttttatggattattttatgttatatttggttgtttcgttttgtatatataggggaggcgtaggttgcgaaggaaggtaaggtgatgggaaagtaaagtttgttttgatttatttatttagatgtttatttgtataagttagttcgttcgcggcgttgtcggtcgcgttttcggcgtcgggcgattttttttcgtcggtttttcgtttttttatcgttgaggtcgtttttggcggattagcgagcgcgaattagggttgtttcgagtcgtttatagttttgtgttcggagtcgtttattcgacgggtgcgggatttttggcgcgggtagtttggagggcgtgagtagtaacgggggtggggtggggttggaggaattgtcggcgagtttattttttagtattttaggcgggttatatttttttttagttcggttttttttgtttttttattcgttttttgtgggagttgcggttagagttgggttggagattgggaaatgtagtttttatcgttttcgttagttcgtcggcgagtggcgggagttcggagtttttttagagggatcgagatttcgatgagttcggaaagttcgggttattaatgaagtgtttattgcgtcggaggcggcggcgcggttttgcggttggcgttcggtcgttagtacggaataataacgtcgcggaggtgaagcgcggcgtgcggcgcgcgattcgagggtcggggatgtttttatttagcgcgcgttgcgcgtcgggtttagcggttatgggggtagcggtagtttagcgggtttggtcgggtcgtggaggtagggggcgggttggagttgtgtaatttgtaaggatgtcgtttgggcgatttaaagtttttaattatttgttttatagtgtagtaattgaggaattcgagtgtttaatttttgttaaagatttgaattttgagggttggttttggtaggagaaggtaggttttatttggtaagttgttatagatacgtttgtatatggttatgttttttttttttgaatttttgatagaaggtaaaatatttttcggtgtttgtagttggagttggggaaaaataaattttgttaatggaagttttttgtttttgagtagtgttataattttatttttaattttttttatttcgtcgtttttttggttttttaggttgtgtatttaagttttatttttcgatttgttaaaagtagaagagaaataattatttatttttgatgtgtagagggagaggaatttgttatgaaatttaggttatggtggttatcgggcggggtgttgaggggatttatatataggtttttgatttatttatttttgaaaatttagtgtattttttttttatttttatcgtgtattttttttagttcgtttaagttttttttaaattcggcgttaaattttagttttttttttagtttgattttttgattttattttttatatttgtaatttgtatagatgttgaatttatttagagaatttcgtgtttttaagttggcggttacgcgtttgtagaaggacggatatttgttagaaacgtacgtttattttttttaaaattatatttttatttttttgacgttagcgattagaaatttttagttttggtatattgtgatttttttggaatagcggattagaggaaaagtttgtatcgtcgcggcgaaatttcgcgcgcgaatatacgtagattcgggttggagtttgggttataaataattgtattattagggggagaggtttttgtagttagaatgtttagttttttttgtttttttgggtgtaagttacgtgaagaggattttgattttaagagtttgaattttttagatgtagaagtgtgatgtataaaaggcgcgggggtgatgggagggagggtggtgatttgtggttggcgggcggcgagtgcgttcggtttttaggcggcgacgtttttagggcgtagcggcgattaagagttggcgttttaggagtttataagtttcgaggcggttcgtagtatttaagggttagcgttgggaatcgtttgaagtaggtgtcgggttttttggggtatttgggggtggttagaggaagataagaaattttttttttttattttttttgtgtacgttttttcgggttggttagttattatcgttatagggagcgcgtgttagagtttgacgtttgaaggtaaagtgtagttgtttatttttttttttcgtaaatgtcgtcgtcgtcgtcgttttttttttagaggagatgtttttcgaaagttattttttttttttcgaaagttattttttttttttcgattttttttcgagcgagggcgttatcggttttttggagtgtttaggtttggtagaggcgtaatggatgtttggcgcggttggcgcgttcgtttggtagttttcgtttcgttttttcgacggtttcgttttagtttcgggacgttagtttttgttcgcgcggtcgttgtttgggtttgttagggcgcgtttttagtttagttttttttttattatttgttggtttataggatttcggggcgcggagttttggagttttaggtttggtttttagcgttcgggtgagtcgagggattgcgttttcgcgggcgtaaagggaggtcggtattttgtttcgagcgggaagggatacgcgtttttttgagggtttaattagagagcggatcgagtagaagagagacgtacggattatttgagagcggttttcgattaaacgttttcgggtt

SEQ ID NO: 212 - DNA, 2304 bp, Artificial Sequence
  chemically treated genomic DNA (Homo sapiens)
cgatttttttgttttagtttttcgagtagttagaattataggtgtgagatatgtatttagttaattttttgtgttttttagtagaaacggggttttattatgttggttacgttggtttcgaatttttgattttaagtgatttatttattttcgttttttaaagtgttgggattttaggagtgatttcgtatgtttagttattaataaatatttattaagtgtttattttgtttttaagagtgttgggaatttagtagtgaataaaataaatattttttttcggggattttgaatttaagtttagttagggattattttattaagagattaagttaatatttaatttttttatagatttagataggatagtattttaatttttcgttgatttgtttttttagattttagattatgggtattgtagatttttgtattttttgtagaggtagggttttattattattagagattttattattatttttatgtgaagggaaatagtgtttttttagtagataacgttaaattagttattagacgtgggttatggtgggtttgtcgtgattgttataaatacgttttatcgaagtttgttaggggacgttatatttttttttagaaagtaagaaatagagaaaggtttttttttgtttcggattgttttttttttagttttaagaaatttttttatagttgttattttattttggtttgttttttgagtaagaaaattgttggaaagagtttgttatttatttagattataattagggagtttgttgttatttaggaagggttttaaaaaatttttttgatttattgtgagtgtaaatttttgatatttttgtatttttttatttattttattttgattttatatatagtgcgattttgaaaggaagcggtgtttttggagaggtagaaaaattttggaaaataaggtttatgacgttggttattagtacggggttgttgtttgttgtgtgatatgtttaggggtgacgcgtttttcgaaagagatatttggtagagaaggtacgggcgcgaagttcggttgcgggagagttgggagtttgaatgtcgttggttgtcgtttatagtaggttttttttgagtatcgtggggaggtagtgatattcgttggtttcgtagcgatatttcggtagttgttttgttttttagtttggacgtgataggtgtgttttggaggatagttagaggaagataggtaagttatattggtttttttcgaggttatattttcgtttaggttaggttgtttttaatagatatttttcgcgggcgttgaggtagttagttttattgttatttagataatttttttttcgttttgttaattttgttttttttttaagaatgtttaaattttttatttaagcgatgagagggaaatatttgagttgtatatttaaggagatgtgggtttttattttggttttgcgatatattattggtgggatcgtgggtgagttatttaatttttttagtttttagtttttttatttgtaaagtgggttttagtatacggtttaattgaggtaatatacgttgtttatgttagttgttgtttttatgtcggttttgtttaggtttttttatggtaataggataggagttttttgtttgtgcgttagttttttattagcgtgggaatgttgtgaggagggggcggaattcggtgtagtaagggtttttgttcgtattttttattttttttttttttttttttttgagattgagttttgttttgtcgtttaggttggagtgtagtggcgcgattttcgtttattgtaagtttcgtttttagggtttacgttatttttttgttttagttttttaagtagttgggattataggcgttcgttattaagtttagttaattttttgtatttttagtagagacggggttttatcgttttagtcgggatggtttcgattttttgatttcgtgattcgttcgtttcggttttttaaagtgttgggattataggcgtgattatcgcgttcggttcgtattttttattaagaattagtaattacgggttgggcgtggtggtttacgtttgtaattttagtatttagggaggttaaagtgggcggattacgaggttaggcgatttagattattttggataatacggtgaaatttcgtttttattaaaaatataaaaaatttggtaggcgtggtggcgggcgtttgtagttttagttattcgggaggttgagggaggagaatggcgtgaatttgggaggcggagtttgtagtgagtcgagatggtatta

SEQ ID NO: 213 - DNA, 2304 bp, Artificial Sequence
  chemically treated genomic DNA (Homo sapiens)
tggtgttatttcggtttattgtaagtttcgttttttaggtttacgttattttttttttttagtttttcgagtagttgggattataggcgttcgttattacgtttgttaaattttttgtatttttagtagagacggggttttatcgtgttatttaggatggtttggatcgtttgatttcgtgattcgtttattttggtttttttaagtgttgggattataggcgtgagttattacgtttagttcgtggttgttggtttttaatagaagatacgggtcgggcgcggtagttacgtttgtaattttagtattttgggaggtcgaggcgggcggattacgaggttaggagatcgagattatttcggttaaaacggtgaaatttcgtttttattaaaaatataaaaaattagttgggtttggtggcgggcgtttgtagttttagttatttgggaggttgaggtaggagaatggcgtgaattttggaagcggagtttgtagtgagcggagatcgcgttattgtattttagtttgagcgatagagtaagatttagttttaaaaaaaaaaaaaaaaaaaaaatagaagatacggatagaaatttttgttatatcgagtttcgttttttttttatagtatttttacgttagtgaaaaattgacgtataggtagagaatttttattttgttgttatggggagatttaggtagagtcggtatgaaagtaatagttgatatgaataacgtgtgttattttagttaagtcgtatgttggagtttattttatagataagaaaattgaggattagagaagttaagtgatttatttacggttttattaataatatatcgtaaggttagaatggaaatttatatttttttgagtgtgtagtttaagtgttttttttttatcgtttgaatgaagagtttaaatatttttgaaaggggaatagggttggtagagcgagagaaaaattgtttgggtgatagtgaagttggttgttttaacgttcgcggaggatgtttgttagaagtaatttaatttaagcgagggtataatttcgagggaggttagtatggtttgtttgtttttttttgattgttttttaagatatatttattacgtttaggttggaaaataggatagttgtcggagtgtcgttgcgaggttagcgggtgttattgtttttttacggtgtttagagagagtttgttgtgaacggtagttagcgatatttaggtttttagttttttcgtagtcgggtttcgcgttcgtgttttttttattaagtgtttttttcgggaggcgcgttatttttgagtatgttatatagtagatagtagtttcgtgttgatggttaacgttataagttttattttttagagtttttttatttttttaaaaatatcgtttttttttaaaatcgtattatgtgtaaaattaaaataagatggatggggagatgtaggaatattagagatttgtatttatagtaaattagaagaattttttaaagttttttttgagtgatagtaggttttttgattatgatttgagtgaatggtagattttttttagtagtttttttatttaagagataggttaggataaagtaatagttgtaaagaaattttttagagttgagagaaagatagttcggggtaggagaaagtttttttttgttttttattttttaggggagggtatggcgttttttggtagatttcggtgaggcgtgtttgtggtagttacggtaaatttattatgatttacgtttgatggttgatttaacgttgtttattgaaagggtattgtttttttttatatagaaatgatggtaaagtttttggtagtggtgaaattttgtttttataaaaggtgtaaaaatttgtagtgtttatggtttagggtttgagggagtagattaacgagaaattaaaatattattttatttgagtttgtaggagaattgagtgttgatttgattttttaatagagtgatttttgattagatttgagtttaaggttttcgagggaaggtatttattttgtttattgttaagtttttagtatttttgggaataaagtaggtatttagtaagtatttattgatggttgggtatgcgggattatttttgaaattttaatattttgggaggcgaaggtgggtggattatttgaggttaggagttcgaggttagcgtggttaatatggtgaaatttcgtttttattaaaagatataaaaaattagttgggtgtatattttatatttgtaattttagttattcgggaggttgaggtaagagaatcg

SEQ ID NO: 214 - DNA, 2280 bp, Artificial Sequence
  chemically treated genomic DNA (Homo sapiens)
attagtatagaattgttattataggattgtagtttaagtattagagtgatattaattggttatgtttaattgttttaaaattattttttaaataattatattgatattataatagaaattatgggtatttattttatatttagatggaaggtattattggatatgtattaaaaaaaagattttttgaaaaaaataaaataaaataaaatattattattaaaataaaagaatttaaaataatttttaaaaattttttttaataaaatatattgttaatttataaaatggattgatgattagttatgtaaatgttttaaataaaatttttatattttttttatagttaatttatgttttgaattgtttattgattataaataatggtgaaatggtattttttgattatattgtattttgtttatagaaagtttgatatgatggaatttattaggtaagagggtgggtgttgtgaatgagatgttgtttttagttgtgggggtgggtagagtttttggagtgtgtggattttatgtgagttatgtagtattttttgttttttgttagaagttaaagttatttatttataatatatttatgtttttgtgtaattgtttatttttgtgtagttaatagggagttattatggggttaatttataggggaaaaatagatatttatttttttatatagatgtggatatatgtatatatgtatagaattgtggtatttaattttataggttttggggttgagggtgagggtattgttagtttttttagtagggttgtgttgggttttttgttaaaaggggtttttagtaaagagtgagttggttgtgtttttttagttttttatagtttgttttttgttttaaggagggagttaagtaaggggttaggtttttttggttgtgtgagtttatagttatttatttatttatgtttatttaggttgatggtgtggggatttgggtatatgtttttttagtttttggggtgtttgtggtggggaaggatgtattgttttttttttgtttttttttattggggttggggttttagtttgagagtgagtgagagttatagttatatattttgtgggttttatttgtgttgtaaggtttattgtgttagtaggaagagttatagattgtttgtagggaattaattttggatgtggaggagttggtattttgttttttggattgtttttggttttttaggataaatatgagtatgtttattatggtgaaggtggaggtgataaatattagtagtagttttgggattaatattgagatggatattttgttggtgtttaggtaggagttggagtgtgttttggtttttgttaatttagtgttgtttttattgtgtgaagttaatgtgggtgagattttagtgtatagttgagggtagattttgttattggagaggagtatgaaattttttttaaagaagtttattggtgttttatatttgaggttgtttattagtattttggaatttaagtgttttgtttattgtttgaaaggtataattgtgtaggagtatttttaggggtttttgtggaggtttatttggatgatggaggttaattggtttagtatttttgttattgggaggtatatgaagtaattgttgtgtaggttgagtttagagagtgagattttagtgaatatgtttataggtagggattttagtaggttgttgttgagaatgaggatttttagtttgggtatggtattgaaagtgtttgggaggatgagttggatagtgttgtattttatgtttaggtattttaggttttgtagttttgtgaattttttttgggatagtgtgtttaggtaattgttatttatgtatagttatttgaggtttaaaaggtttttgaaagtgttgttttttatagtagtgatgttattgttgtttagatttaatagaatgaggtttttgtaatttataaagtgtgatttttggatgttgtggattttgttattttgtaggaaaagtttttgtatgttagagagtttgggttttaaattagttaagttgtttatgtttttgttgttgtagtttatttttaaatttgattttgggatgtggttgtagttgtagtttttagggtagggtaaattgttagttaagggtttgtttttggagttatttgttgttattgttgttgtgggtttgattttgatttgttagttgtttgggatttttgtatttttgtttggagtagattttggtgtggtatgatttttttgtttatttgttttga

SEQ ID NO: 215 - DNA, 2280 bp, Artificial Sequence
  chemically treated genomic DNA (Homo sapiens)
ttaagataaatgggtaagaggattatgttatattagggtttgttttaaatggaggtataaagattttaggtaattggtagattaaaattagatttatagtagtgatagtgatgggtagttttaggaataaatttttagttaatagtttattttgttttgggggttgtagttgtgattatattttagggttgggtttaaagatgaattgtaataataggaatgtgagtagtttggttgatttgaagtttaagttttttaatgtgtaggagttttttttatgagataataagatttatagtatttgaaaattgtattttgtggattataagaattttattttgttggatttgggtaataataatattgttattgtagagaataatatttttaagaattttttggattttaggtggttatatatggatagtaattatttggatatgttgttttgggagaaatttgtggggttgtaaaatttagagtatttgaatgtggagtataatgttatttagtttatttttttgggtatttttaatgttatgtttaaattgaggatttttatttttaataataatttgttgaggtttttgtttgtggatgtgtttgttggggttttgttttttaaatttagtttgtataataattattttatgtattttttggtggtaggggtgttggattagttaatttttattatttagatagatttttatggaaatttttgggagtgtttttgtataattgtgttttttaagtagtgggtagaatgtttgggttttgaagtgttgatgagtgattttaagtgtgagatgttggtgaatttttttagaaaggattttatgtttttttttaatgatgagatttgtttttagttgtatgttaggattttgtttatgttaattttgtatagtaaaaatagtattgggttggtggagattgggatgtattttaatttttatttagatattagtagggtgtttattttggtgttggttttgggattgttgttggtgtttgttatttttgtttttattgtggtgggtatgtttgtgtttattttgaggaattgaaagtggtttaagagatgagatgttaatttttttgtgtttgagattaattttttatagatagtttgtgattttttttattggtataatgggttttataatgtagatggggtttatagagtgtatgattgtggtttttatttgtttttagattaagattttaattttaataggggagggtagagggaaggtgatatatttttttttattgtaggtattttgggggttggaggggtgtgtatttaaatttttgtgttattagtttggatgggtataagtagataaataattgtgagtttgtataattgaaagggtttgattttttatttagttttttttttgaaataaagagtagattgtggagagttgggagagtgtagttagtttgttttttgttgagagttttttttgatagaaagtttagtatgattttgttggaagaattgatagtgtttttgtttttggttttggggtttgtggggttggatgttgtggttttatatatatatatatatatttatatttatatagagagatagatatttattttttttttgtggattagttttgtgatggttttttgttggttatgtagggatgggtagttgtatgaaggtatgaatgtattgtaaataagtaattttgatttttgataaaaaataaaaagtgttgtatggtttgtatggaatttatgtgttttagggattttgtttgtttttgtgattggagatggtattttgtttatagtatttatttttttatttgataagttttattgtattaaattttttataaataaaatatagtataattagaaagtgttattttgttattatttgtgattggtaggtagtttagagtataagttaattgtgaaaaaaatgtaaaggttttatttaggatatttgtatggttagttattagtttattttatgagttaataatgtattttgttgagggaagtttttaggggttgttttgggtttttttattttgatggtgatgttttattttattttattttttttagggggttttttttttaatatatatttaataatgttttttatttgaatgtaaaataagtatttatgatttttattatagtattagtgtaattatttaaaaaatgattttgaggtagttaagtatgattaattaatgttattttagtgtttaggttgtgattttatggtagtaattttgtgttggt

SEQ ID NO: 216 - DNA, 2345 bp, Artificial Sequence
  chemically treated genomic DNA (Homo sapiens)
gtgtttggttgttatttttttttaattttattggtgtttgtgggttgaagggttaggatggattagaggtgagtaattttggtggtattaggtattttttgatttgtttgggttgttagttgtatggattttgggtagatgtgtgtagtggttgtggtatagggtggggagtggttgtttggttttattttaaggtagtagaatgtttagagttggtttttggttttaggtgtaggttgagtagtagttgggtgggtagtggtgttgggtaggtttttttagttgggttgataggttgttttgatttagttattagattttgtttgtgttttggtagtgtggattttagggtaattttgttgtagtggttaagttgggggtggaattggtttatatttttgaattgagtaagtttaggagtaggtgtgttggtggtgttgtgaagtggtatttatgataggtaggttgggtgttgttattttgaaatttttgagggaggattagttagtttaggttggtgttggagttgtagtgttatttgtaggttaagaagtttttttttgggaggttggagttgtagtgttatttgtaggttaaggagtttttttttgggaggttggagttgtagtgtgatgtgtaggttaaggagtttttttttgggaggttggagttgtagttgtagtgaagttataggttttgtgatgttataggtgggtaggtgtattagtttgtaatggattggtttggttttatttgtgaggttttgtagtggttgtttggtttggtagtggttgtttggtttggtgtggtagtgattgtttggtttggtatttttggtttagtggttttttttttgtagattggaaattgtgggttattttgttgggaggttgtggttgaggtagtagtttgttattgatggttttttggggtggagaaaagtggggaggggttgaggggtttttgaagttggtagtttatgttatgaggaaaattggtagtgttaggagttaggaggattagtggtatttgggttatttgggggattagtggtttttgggttttttttatagttggtggaaaaatagtgttggtagtgagagtaagtatggtgagggtgttttagattagttttagtatgatgtttgtttggaagattttggtgagttttatagagttgtttggttgggtgatgtttttggggtggagtatgttttggtttttggagatattggtgtggataagagggataggaagaagaggtaatggttaggtgaaggatgtgggtgtgttgttttgttggggatattggttttttggtgtttgtaggttttatggtatttgggatggggaaatgttagaggggttaggggtttaggttttttagtgagatgggattaaatataaaggattattattattgtaaaagtgttggtttattttataggagttttttttaaaaatattgtattttttaattgtgtttatttatttttttaatttatttattaaatataagggttgggtgtggtggtttatgtttgtaatattagtattttgggaggttgaggtgggtggattatgaggttaggagattgagattatggtgaaattttgtttttattaaaaatataaaaaattagttgggtgtagtggtgggtgtttgtagttttagttatttgggaggttgaggtaggagaatggtgtgaatttagaaggtggagtttgtagtgagtggagattgtgttatagtatttttgtttgggtgatagaatgagattttgttttaaaaaaaaaaaaaaaaaaatataaattgaatatttattatatagtagatatattttattgttgtttaggttttttttatttttaagaattttatgttggttgggtttggtggtttatgtttgtaattttagtattttgggaggttgaggagggtagattatgaggttagaagtttgagattagtttgattgatatggtgaaattttgtatgttatgtttttgttttagtttagatttagttaaaatttttatgataaattattttttaggtttttggggtttagtttaaataatgttgtagaaagagatgagttttttttttttattgttattagatttgtatgttgaggattttttttttagattgtggaatgttttatattatttttttttagatttgtggtaggaagttattattagaattttgagttttaagtatgttagttggatttaatagagttaagttttatttatgatttatgaatatttatgtataaaatgagagttttggtagggtgtagtggtttatgtttgtaattttagtaatttgggaggtt

SEQ ID NO: 217 - DNA, 2345 bp, Artificial Sequence
  chemically treated genomic DNA (Homo sapiens)
agttttttaaattgttgggattataggtatgagttattgtattttgttaaagtttttattttatatatggatatttatgagttatggatgagatttagttttgttaaatttaattaatatgtttgagatttagaattttggtgatggttttttgttataaatttgggaaaggataatatgggatattttatgatttaagaaaagggtttttagtatatagatttggtagtaatgagaaaaggaaatttatttttttttgtaatattatttgaattgaattttgagggtttaaaggataatttgttatgaaggttttagttaagtttaggttgagataaaagtataatatgtggggttttattatgttggttaggttggttttgaatttttgattttgtgatttgttttttttggttttttaaagtgttgggattataggtatgagttattgagtttggttaatatgaagtttttaaggatggaaggaatttgagtgatagtagaatatgtttgttgtataataggtatttagtttatgtttttttttttttttttttgagatggagttttgttttgttgtttaggtgggagtgttgtggtgtgatttttgtttattgtaagttttgttttttgggtttatgttatttttttgttttagttttttgagtagttgggattataggtgtttgttattgtgtttggttaattttttgtatttttagtagagatggggttttattgtggttttgattttttgattttgtgatttgtttgttttggttttttaaagtgttggtattataggtgtgagttattgtgtttggtttttatgtttgatgaataaattgagaaaatggataaatatagttgggaagtgtaatatttttaaagaaaatttttgtaaagtagattaatatttttgtaatagtaataattttttatatttgattttgttttattaagaggtttgggtttttgatttttttgatgtttttttattttgggtgttgtggggtttgtgggtattagaaagttagtgtttttgataggatggtgtgtttgtattttttgtttggttattattttttttttttattttttttgtttatgttagtgtttttaggaattaagatgtgttttattttagggatgttgtttgattgggtagttttgtggagtttgttaagattttttaggtggatattgtgttggggttggtttaaggtgtttttattgtgtttgtttttgttgttgatgttgtttttttattagttgtaggagaagtttgaggattattggttttttgggtagtttaagtattattggtttttttggtttttgatgttattggttttttttgtggtgtagattgttggttttggagattttttagtttttttttgtttttttttattttaggagattattagtagtgagttattgttttggttataattttttagtaggatagtttgtggtttttaatttgtgaaaggaggattgttaagttagaaatgttaagttaagtgattattgttatgttaagttaagtgattattgttaagttaagtagttattgtaaagttttgtgggtaaggttaagttaatttgttatagattagtgtgtttgtttatttgtgatgttatggaatttgtgattttattgtaattgtagttttagttttttagaaaaagattttttggtttgtatgttgtgttgtagttttagttttttagaaaaagattttttggtttgtaggtggtgttgtagttttagttttttagaaaaagattttttggtttgtaggtggtgttgtagttttagtgttaatttgggttggttggtttttttttggaggttttggggtggtggtgtttagtttgtttgttatgagtgttgttttatagtgttgttggtgtatttgtttttaggtttgtttggtttaggggtatgggttagttttgtttttggtttggttattgtagtgaagttgttttagggtttgtgttgttaggatgtaagtggagtttgatggttgggttagagtggtttgttagtttggttggaagggtttgtttgatgttgttgtttgtttagttgttatttggtttgtgtttggagttagggattagttttgggtattttgttgttttaggatggggttgagtagttgttttttgttttgtgttgtagttgttgtgtgtatttgtttagggtttgtgtagttggtgatttgggtaggttggggaatgtttggtgttattgggattgtttgtttttagtttgttttgattttttagtttgtgagtattagtgagattgaagaaaagtgatggttgggtgt

SEQ ID NO: 218 - DNA, 2605 bp, Artificial Sequence
  chemically treated genomic DNA (Homo sapiens)
gggtgttgtagtttgggtgtagagggaaaaaaggatttatagatttgtggtttgtgttgtgtgtgtatgttgtgttagggttttaggttggtgtgtattttttttttggtttttttagtttgattgtttttgtttttattttataggtttgggatgtatttttttatttgttgttgtttttttttatgggtttttgtttttatttttaagaattttaattattttgtgttggaggagtaaggggttggtatggtgattgggaatattggtagggatgtttgattgtagtttgggtttttgtttgtagagtgtggtggtggagggtgtagtaagttgggtagttattgggtgttggagaattttgtattgtatttgttggatgtggatgtagatagtgggtttttttatattaagtagtgtattgattgtgagtttttgtgttgttataatgttaagtgttagttgttttttgaggtgtttgttaatgataaggagatttgtatgattaaggtagagatttaggatattaatgataatgtgttttttttttttttggattagattgaaatggatattttggagaatgttgttttgggtatttgttttttttttattagtgtatatgattttgatgttggtgagaatgggttttgtatttatttgtttatgtgtgatgattatggtttttttggattggatgttaagttttgtggtgatggtattaagtttttagaattggttatttagaaggttttggattgtgagtaatagaattattatatgtttgtgttgattgttttggatggtggtgagtttttatgttttgttattgtatagattaatgtgaaggtgattgattttaatgataatagtttggtttttgaggtgttattttatttggtggaattgtttgagaatgttttgttgggtatagtggttattgatttgaatgttattgatgttgatgaaggttttaatggtgaagtgttttatttttttagtagttatgtgtttgattgtgtgtgggagtttttttttattgattttaagattggtttaatttgtgtgaagggtaatttggattatgaggaaaatgggatgttggagattgatgtgtaggtttgagatttggggtttaattttattttagtttattgtaaagttatggttaagtttattgattgtaatgataatgtgttgtttattggttttgtttttgtgtgttagggggtgttgagtgaggttgttttttttggtattgttattgttttggtgtgggttattgattgggattttggtaagaatggatagttgtagtgttgggttttaggtggaggagggatgggtggtggtgggggtttgggtgggtttgggggttttgttttttttaagtttgaggagaattatgataatttttatatggtggtgattgattgtttgttggattgtgagatataagatgagtataatgtgattattgtggtgtgggatgggggtttttttttttttaattttattaagttgtttgtgattaagattttagatgagaatgataatttgttttggtttattaaagggttttatgtgttttaggtgtatgagaataatattttgggagagtatttgggttttgtgtttgtttaggattttgatttgggttagaatggtattgtattttattttattttgtttttgtatattggtgatgtgtttatttatatttatgtgtttgtgaattttatgaatggggttatttatgttttgtgtttttttaattttgagtagattaaggtttttgagtttaaggtgtttgttaaggatttgggggtgtttgtgtatttggagagtaatgttatggtgagggtgatagtgttagatgtgaatgataatgtgttagtgattgtgttttttatgttgtagaatgatattgtggagttgtaggtgttgtgtaatgttggtttgggttatttggtgagtattgtgtgtgttttagatagtgattttggtgagagtgggtgttttatttatgagattgtggatggtaatgatgattatttgtttgagattgatttgtttagtggtgagatttgtatgttgtattttttttgggaggatgtgatgtttgtggtggagttggtggtgaaggtgattgattatggtaagtttattttgtttgtagtggttaagtttattatttgtttggtgagtggatttttttttgagggggtattatgggtgaatggtgagtagtattattgggatatgttgttgttgtttattgtgattttgagtattatttttattatttttttagtggttatgattattattgttgttaagtgtaagtgtgagaataaggagatttgtatttataattgttgtattgttgagtatagttatttgtagttgggtgggggtaagggtaagaagaagaagattaataaaaatgatattatgttggtgtagagtgaagtggaggagaggaatgttatgaatgttatgaatgtggtgagtagtttttttttggttattttttttatgtattttgattattagatttgtttgttttttagtttgttttggttggaggtgatgtattttaaat

SEQ ID NO: 219 - DNA, 2605 bp, Artificial Sequence
  chemically treated genomic DNA (Homo sapiens)
gtttgagatatattatttttgattggggtgagttgaggggtaggtgggtttggtagttgaagtatatgggggaggtggttagggaggggttgtttattatgtttatgatgtttatggtgttttttttttttattttgttttgtattagtatgatattatttttgttgatttttttttttttgtttttgtttttatttagttgtgggtggttgtatttggtgatgtggtagttgtaagtgtggatttttttgtttttgtgtttgtatttgatggtgatggtgattatggttgttaggaggatgatggagatagtgtttagagttatgatgagtggtagtgatatgttttagtggtgttgtttgttatttatttgtggtatttttttgggaagggatttgtttattgagtggatgatgagtttggttattgtggatagggtaggtttgttgtggttggttatttttattattagttttattatgggtgttatgtttttttagaaagggtgtagtgtgtggattttgttgttggatgggttgattttaaataggtggttgttgttgttgtttatgattttgtaggtgagatgtttgtttttgttgaagttgttgtttagggtgtgtatagtgtttattagatagtttaggttagtgttgtgtggtatttgtagttttgtggtgttgttttgtagtgtggggagtatgattattggtgtgttgttatttatgtttagtattgttatttttattgtggtgttgttttttaagtgtgtgggtgtttttgagtttttagtaagtattttgaatttaaaagttttggtttgtttgaagttaaaggagtgtagggtgtagatggttttgtttgtgggatttatagatatataggtgtagatagatatgttgttgatgtgtgagggtaggatagagtaggatatggtgttgttttggtttaggttgggattttgggtgagtatagagtttaggtatttttttgggatgttgtttttgtgtatttgaagtatgtagagttttttggtgaattgaggtgggttgttgtttttgtttagaattttgattgtgaatgatttggtggagttgaggggaggagagtttttgttttgtgttatgatggttatgttgtatttgttttgtgttttgtggtttagtgggtggttagttattattgtgtagaagttgttgtagttttttttaagtttgaaggggatggaatttttgggtttgtttaggtttttgttgttgtttgttttttttttgtttaggatttgatattgtagttgtttgtttttgttagagttttggttagtgatttgtattagggtgatgatggtgttgggaggggtggttttgtttagtgttttttggtgtatggagatgaaattgatggatggtgtattgttgttgtggttgatgagtttgattgtgattttgtagtgggttgggatagggttaggttttaggttttgggtttgtatgttaatttttagtattttgttttttttatagtttagattgttttttatatggattaggttggttttggggttgatggagaagagtttttgtatgtggttaggtatgtagttgttgaaagagtagagtattttattattgggatttttattggtgttggtggtgtttagattgatgattattgtatttagtggagtgtttttgggtagttttattaagtaggatggtgttttgaagattgggttgttgttgttggagttaattatttttatgttgatttgtatggtggtggaatgtggaggtttgttattgtttagggtagttagtatgagtgtatggtgattttgttgtttgtggtttagagttttttggatgattagttttgggaatttggtgttgttgttgtgggatttaatgtttagtttaaagaggttgtgattgttgtgtgtgagtaggtaggtgtggagtttatttttgttggtgttggggttatgtgtgttggtgagggggaagtgggtgtttggagtagtgttttttgagatgtttattttgatttggtttgaggagaaggagggtgtgttgttgttgatgttttggatttttattttgattatgtagatttttttgttgttggtgaatattttgagggatagttggtatttggtattgtggtggtatagggatttgtggttgatgtgttgtttggtgtagaggagtttgttgtttgtgtttatgtttagtaggtgtggtgtggagttttttagtatttggtagttatttgatttgttgtgttttttgttgttgtgttttgtaggtggaagtttaggttgtagttgagtatttttgttgatgtttttgattattgtgttggttttttgtttttttggtatggagtagttgaggtttttgagagtgagggtaggggtttatagaagaaagtagtaatagatggaaaggtatattttagatttgtaaggtgggggtaggagtaattggattggaggagttagagagggagtgtgtgttagtttggggttttggtgtagtgtgtgtgtgtgatgtgagttataagtttatgggtttttttttttttttgtatttgagttgtggtattt

SEQ ID NO: 220 - DNA, 2477 bp, Artificial Sequence
  chemically treated genomic DNA (Homo sapiens)
tggtatagatatggtttttaaagttaaaaattatgatggagtgaaggatagttgtgtttagatttgtgttttgttttttggaggttgttgtggttttggggatgagttggaggtgggtaggtagtggtttttggggtttgtagtagggaggttattatttgtatagtagaatatagtattattttatagggagtattttggggtgggtagtaattttggaggtatttttgggaaggagttaggtatgggggaggtggaggtgattttagaagtagaggagttgttggggagttatggttttttgggtgtggagttgtggaggatgagtgttattttttttttttgggttttttattttgtagggatttttatgtttaggattatttgattgttaaggttttggtatttttgttaggttagttgggggttaaggtttttaattttgaggattggggttgttaatatgggtagtagtataggaggttgagaggaggtttataagggttgtattttttttttggttgtagtttattttttagagtagggtgggtgtggagttatttttattagtattgttggttttgagggtttggtgggtagtgttgtttggtgtgggggatagtttttgagtaggttgttgtatttttggtattttggtttttttgggatttttaggtggtttatgtttggtagtgtttgttttttgggtttttagggtttgtttttgttgtagtttttgtagtgggagtattgttgagtattgtttttgggagaggatgattttaggttttatagttaagttgttttgaggttaagtgttttggggtttagggagttttagtagtagttttgtatggttaggtttgggttatggtgttgtttagtggtttttgtgtggttagtatttgaatggttgtttgtttggtttggtgtgttttttttttttgggttttttttttggttgtttttttttgttggtgtaggtttaagagggtttttttgtttgattgttgttgttgtttttgttaaagaagttggtgttatgtggtgtttatatttggaagatggaatttagatttagattagaggtttttttataatgttttggagttttttagagtttgtggaattttagggttagtagggaaagtgaaattttattaggattttgaatttgttatttttttgttttatagaggatgagttttatgttgtaggtggttaatagttttggtgtgggggagatagttttgtttttatagaatgtttttttgagattttttagtttgggatggatttagtaggtgttttttgatatttaggttttgaggattgttagtgaggattattttgattgtttgtggggatttagggttaagaaggatgttgtatttagagatggggtttatgagtaattttaggttttgattttatttgttttagaaatttaaatttttgggattttgggttagattttttgggggagtatggagtgattgagatgtttatattgattttttgtttggtttgaagtaagtgttttaggtgggtagtttttgttttgtgttgttgtatttggtgttggtattagtgttggatggtgatagtggtttggtttatttggtggataaatttgtttggagagtaggatttagggttaagataggattagtgttttggtaggatttagttggttgttggtggaaggttgagttggggaagagagaagttggtggttgtatttaagtagttttttttataaggtaggattagtttatttggattatttttatatggtaggattagttgtttggattagttttattaaaatttaaaattttttttttgggaaggtgtttaggggagaggaaatgtttatttatgtaggtttgtgtggttttatttataattgttaggaagtgggaagagtttaaatgtttatgatttggttatagtgtgaatattggatggtgggattttatttataggtaataggtttgggatttaggttagtgtagattataggttgtggttttatagagagggtggttggaataggtagggttatgagggaatagattggtggttgttggtatttgggtggggaaggagtttgagggaagtttggtggtgttgggttgtttttttattttggtttgttgtgtttatagatagtattatatattttggtggaattttatggaattgtatatttataatgggtattttttattgtatataaattatattaagtaaaattgattaagtaaaaaaaaaaatgttttattttggtttttgggattatgtgtggatttttttagtaaaggtattaatagagaatttagaatgtgtgagttttagtttgggagtagtttgttttgggtagaattggggggttttaaggggttgtgggtttttggtttttttttttttgtgttatttattgtgtttataggtttggtttttttagttttaat

SEQ ID NO: 221 - DNA, 2477 bp, Artificial Sequence
  chemically treated genomic DNA (Homo sapiens)
gttagggttagggagattaggtttgtagatgtggtgggtggtatgagggaagggggattagaagtttgtaattttttgaagttttttagttttgtttggggtagattgtttttgagttagggtttatatgttttgggttttttgttagtgtttttgttgagagaatttatatatggttttgagagttaaggtgaagtatttttttttttgtttaattagttttatttagtataatttgtatataatagaaggtgtttattgtaagtgtgtagttttatgagattttattagggtgtatagtgttgtttgtggatatagtagattaagataaggaaatggtttagtattattaggttttttttgagttttttttttgtttagatgttagtagttattagtttgtttttttatagttttgtttgttttgattattttttttgtggagttatggtttgtggtttgtattggtttgagttttgggtttgttgtttgtgggtagggttttgttatttagtatttatgttgtagttaggttatgggtatttgaattttttttattttttggtaattgtaaataaggttatataggtttgtgtgggtaggtgtttttttttttttgggtatttttttaggaagaaggttttgggttttagtggagttggtttaggtggttggttttgttatgtgaaaatggtttaggtgggttggttttgttttgtgaaaagggttatttgagtgtagttgttggttttttttttttttggtttgattttttattagtagttagttgggttttgttggggtgttggttttgttttggttttgagttttgttttttgggtaggtttatttattaggtgaattaggttattgttattatttagtgttggtattggtattaggtgtagtggtgtggagtaggagttgtttgtttggagtatttgttttaggttaagtgggaggttagtgtgggtgttttagttattttatgtttttttggggggtttggtttagaattttaggggtttgagtttttgggataggtggaattaaagtttaggattgtttgtgggttttgtttttgggtgtagtattttttttgattttgggtttttgtggatagttagggtggtttttattggtggtttttagggtttgggtgttaggaaatgtttgttgggtttattttaggttggagagttttaggaggatgttttgtgggggtagagttgttttttttatgttagaattgttggttatttgtgatgtagggtttattttttgtagagtagagaaatggtaggtttaaggttttggtggggttttattttttttgttggttttgagattttatgaattttaggggattttagggtgttgtggggaaatttttggtttgggtttggattttgttttttagatgtaaatgttatatggtattggtttttttggtaggagtagtggtagtggttaggtgaggggatttttttggatttgtattagtagaaagaggtagttaggaggaaggtttgggaggagaaggtatgttaagttaggtgagtagttatttaggtgttgattgtgtagggattattgagtagtattgtggtttaggtttgattgtgtggggttgttgttggggttttttgggttttgggatatttagttttagggtagtttggttgtggagtttggggttgtttttttttagggatagtgtttagtgatgtttttattgtaggagttgtaatagaaatgagttttgagagtttagaaggtgagtattgttgagtgtgggttatttgagaattttagggagattagagtgttaggaatgtggtagtttgtttaggagttgttttttatattaggtggtattgtttattaggtttttaaggttaataatattggtgagagtggttttatgtttgttttgttttggggggtggattgtagttaggaaggaagtgtagtttttgtggatttttttttggttttttgtgttgttgtttatgttggtggttttagtttttggagttaggggttttggtttttagttgatttgatgagggtgttgagattttgataattaaatggttttggatgtagggatttttatagagtagaaggtttggaagggaggggtggtatttattttttatagttttatatttagaaggttgtggttttttagtggtttttttgtttttggggttgtttttgttttttttatgtttggtttttttttgggggtgtttttagagttgttgtttgttttgggatgttttttgtggaatggtgttgtgttttgttgtgtaggtggtggtttttttgttgtaggttttggagattgttgtttgtttatttttgatttatttttagaattatagtagtttttagaggataggatgtaggtttgagtatagttgttttttattttattatggtttttggttttaagggttatgtttgtgtta

SEQ ID NO: 222 - DNA, 2291 bp, Artificial Sequence
  chemically treated genomic DNA (Homo sapiens)
gttttaattttagtatatgtttgttgttgaagtaagttttgtttgttttagattgagttttgttttgttatttaggttggagtgtagtggtgtgattttggtttattgtaagttttgttttttgggtttatgttatttttttgttttagttttttgagtagttgggattataggtgtttattattatgtttggttatttttttttgtattttttagtagtgatggggttttattgtgttagttaggatgtttttaattatttgattttgtgatttgtttattttaggtttttaaattgttgggattataggtatgagttattgtattttgttaaagtttttattttatatatggatatttatgagttatggatgagatttagttttgttaaatttaattaatatatttgagatttagaattttggtgagggttttttgttataaatttgggaaaggataatatgggatattttatgatttaagaaaagggtttttagtatatagatttggtagtaatgaaaaaaggaaatttgtttttttttgtaatattatttgaattgaattttgagggtttaaaggataatttattatgaaggttttagttaagtttaggttgagataaaagtgtaataggtggggttttattatgttggttaggttggttttgaatttttggttttgtgatttgttttttttggttttttaaagtgttgggattataggtatgagttattgagtttggttaatatgaagtttttaaggatggaaggaatttgagtgatagtagaatatgtttgttgtataataggtatttagtttatgtttgatgaataaattgagaaaatggataaatatagttgggaagtgtaatatttttaaagaaaatttttgtaaagtagatgaatatttttgtaatagtaataattatttatatttgattttattttattaagaggtttgggtttttgatttttttgatgtttttttattttgggtgttgtggggtttgtgggtattagaaagttagtgtttttgataggatggtgtgtttgtattttttatttggttattattttttttttttattttttttgtttatgttagtgtttttaggagttaagatgtgttttattttagggatgttgtttgattgggtagttttgtggagtttgttaagattttttaggtggatattgtgttggagttggtttaaggtgtttttattgtgtttgtttttgttgttgatgttgtttttttattagttgtaggagaagtttaaggattattggttttttgggtagtttaagtattattggtttttttggtttttaatattaggggttttttttgtggtgtagattgttggttttggagattttttagtttttttttgtttttttttattttaggaggttattagtagtgagttattgttttggttataattttttagtaggatagtttgtggtttttaatttgtgaaaggaggattgttaagttagaaatgttaagttaagtgattattgttatgttaagtagttattgtaaagttttgtgggtaaggttaagttatgtgggtaaggttaagttaatttgttatatattagtgtgtttgtgtatttttgatgttattgaatttgtgtttttattgtatttgtagttttagttttttagaaaaagattttttggtttgtaggtggtgttgtagttttagtgttaatttgggttggttggtttttttttggaggtttgggggtggtggtgtttagtttgtttgttatgagtgttgttttatagtgttgttggtgtatttgtttttaggtttgtttggtttaggggtatgggttagttttgtttttggtttggttattgtagtgaagttgttttagggttggtgttgttaggatgtaagtggagtttgatggttgggttagagtggtttgttagtttggttggaagggtttgtttaatgttgttgtttgtttagtttttatttggtttgtgtttggagttagggattagttttgggtattttgttgttttaggatggggttgagtagttgttttttgttttgtgttgtagttgttgtgtgtatttgtttagggtttgtgtagttggtgatttgggtgggttggggaatgtttggtgttattgggattgtttgtttttagtttgttttgattttttagtttgtgagtattagtgagtttgaagaaaagtgatggttgggtgtggtggtttatatttgtaattttagtattttgggaggttgaggtgggtagattatttg

SEQ ID NO: 223 - DNA, 2291 bp, Artificial Sequence
  chemically treated genomic DNA (Homo sapiens)
taagtgatttgtttattttaattttttaaagtgttgggattatagatgtgagttattgtgtttagttgttatttttttttaaatttattggtgtttgtgggttgaagggttaggatggattagaggtgagtaattttggtggtattaggtattttttgatttgtttgggttgttagttgtatggattttgggtaaatgtgtgtagtggttgtggtatagggtggggagtggttgtttggttttattttaaggtagtagaatgtttaaagttggtttttggttttgggtgtaggttaagtaggagttgggtgggtagtggtgttgggtaggtttttttagttgggttgataggttgttttgatttagttattagattttgtttgtgttttggtagtgttgattttagggtaattttgttgtagtggttaagttgggggtggaattggtttatatttttgaattgagtaagtttaggagtaggtgtattggtggtgttgtgaagtagtatttatgataggtaggttgggtgttgttatttttaaatttttgagggaggattagttggtttaggttggtattggagttgtagtattatttgtagattaaggagtttttttttgggaggttggagttgtagatgtagtgaaggtataggtttagtgatgttaaaggtgtgtaggtgtattggtgtgtaatggattggtttggttttatttgtgtggtttggttttatttgtgaggttttgtggtggttgtttggtgtggtagtgattgtttggtttggtatttttggtttagtggttttttttttgtagattggaaattgtgggttattttgttgggaggttgtggttgaggtagtagtttgttattgatggttttttggggtggagaaaagtggggaggggttggggggtttttgaagttggtagtttatgttatgaggaagatttttagtgttgggagttaggaggattagtggtatttggattatttgggggattagtggtttttgggttttttttatagttggtggaagaatagtgttggtagtgagagtaagtatggtgagggtgttttagattagttttagtatgatgtttgtttggaagattttggtgagttttatagagttgtttggttgggtgatgtttttggggtggagtatgttttggtttttggagatattggtgtggataagagggataggaagaagaggtaatggttaggtgaaggatgtgggtgtgttgttttgttagggatattggttttttggtgtttataggttttatggtatttgggatggggaaatgttagaggggttaggggtttaggttttttaatgagatgggattaaatataaatgattattattattgtaaaagtgtttgtttattttataggagttttttttaaaaatattgtattttttaattgtgtttatttatttttttaatttatttattaaatataagttgaatatttattgtatagtagatatattttattgttgtttaggttttttttatttttaagaattttatgttggttgggtttggtggtttatgtttgtaattttagtattttgggaggttgaggagggtagattatgaggttagaagtttgagattagtttgattaatatggtgaaattttgtttgttatgtttttgttttagtttagatttagttaagatttttatgataaattattttttaggtttttggggtttagtttaaataatgttgtagaaagagatgagttttttttttttattgttattagatttgtatgttgaggattttttttttagattgtggaatgttttatattatttttttttagatttgtggtaggaagtttttattagaattttgagttttaagtatgttagttggatttaatagagttaagttttatttatgatttatgaatatttatgtataaaatgagagttttggtagggtgtagtggtttatgtttgtaattttagtaatttgggagtttaaggtgggtggattatgaggttaggtgattgagagtattttggttaatatggtgaaattttgttattattaaaaaatataaaaaaaaatagttgggtgtggtggtgggtgtttgtagttttagttatttaggaggttaaggtaggagaatggtatgaatttaggaggtggagtttgtagtgagttgagattatgttattgtattttagtttgggtgatagagtaagatttagtttaaaataaataaaatttgttttagtagtaaatatatattaaaattggaat

SEQ ID NO: 224 - DNA, 2206 bp, Artificial Sequence
  chemically treated genomic DNA (Homo sapiens)
gggtattttttgggatggtaagtggtattagtgttgtgagatggttttttttttgttgttaggtgttaggaggtttgtttgggtttgtatgtgtttgggtttggtaggtggggaggtggtatttagggtagtttttgtattggaagttttaggaatttggatttaggttgaaggtttttgttttagagttttggattgttgagtttggaatagttttttttagatatagtgtggtgtgggagtagttgtatgagggtttatgtattttgtatatattagtagtttatttgattttgtttttggttatgtgaaatgtatgtttatttgatttttgattttgtttttggttatgtaggttttgtttgggttgtgataggaggtttggtgtttttaggtatttggtaggtttttttgattttttttttgagtgataggaatgggaagtgagtaaatttaagtagaattaggaggttttttttagaggagtttggtggaatttggttttggttgtgtgttgagtggtggggtatttatagggagatgagttagtgtttattttttgttttagtttttttgtggttgtttttttttttagaaggggttggtttaggttggtgtttttgtggtttttggagtatatttgttgttgttttttttggtttttggtgatagtaggttttttgtattttatttgttttttagttagtatggttttatatagaatatggttgtagataatttttttgtgttttgtatagtgaattgttattttgtgtgggttttattgttaggttagggaggtaggagttgtttttattttttgtttgggagttgttgtttgttttttggatgagttaggaataaatgtgttaatattgggtggttgtttttgttatttttgtgtatgggttttgtggggagagttaggtagtgggtggtgtgggataggtgatgtttatgtttagtatttaggagatttgtatggtagtttttaagatgggtataagtgattataaggagggatgtatgtgttttatttttttatttattatgggattaggttgaggttgtttagggagtgtatgggagggttgtgtttggtgtatttgtagagattttttgaagaggggttttggttgttttttattggggtaggtgtgggtttaggtttttgatattgtgatggtgttgtgggattttgatggattttatttggggagtttaggtttgttttatggtaaggtggttatgtattgtttttgtagttttgagtataggttttatatgggatttgaggtttgggttttatgatatttgggttatgtgtttttttggtgttttttttttggggatgaaattatatttataggtaaaggtttgggagtggagggagatagtaggagataaagtaaggggatgaggattttggtagttataaaggtagtgggagggttttggaggtttttgttgggtagtgtagttaggaaagggtttattaggtgggagaggtaggtgtttggtgagtgttgagatttgtattatgagaagggttgggtttttaaggtatgtatggggtttgggagtggagggagtgtgagtgggtgttaggatggggtttggggtgagtgggtgttaggatgggtttgggagtggagggagtgtgagtgggtgttaggatggggtttgggagtggagggagtgtgagtgggtgttaggatggggtttgggagtggagggagtgagagtgggtgttaggatggggtttgggagtggagggagtgtgagtgggtgttaggatggggtttgggagtggagggagtgtgagtgggtgttaggatggggtttgggagtggagggagtgagagtgggtgttaggatggggtttgggagtggagggagtgtgagtgggtgttaggatggggtttgggagtggagggagtgtgagtgggtgttaggatggggtttgggagtggagggagtgtgagtgggtgttaggatggggtttgggagtggagggagtgtgagtgggtgttaggatgggtttgggagtggagggagtgtgagtgggtgttaggatgggtttgggagtggagggagtgtgagtgggtgttaggatgggtttgggagtggagggagtgtgagtgggtgttaggatggggtttgggagtggagggagtgtgagtgggtgttaggatggggtttggga

SEQ ID NO: 225 - DNA, 2206 bp, Artificial Sequence
  chemically treated genomic DNA (Homo sapiens)
ttttagattttgttttaatatttgtttgtgttttttttatttttagattttgttttaatatttgtttgtgttttttttatttttagatttgttttaatatttgtttgtgttttttttatttttagatttgttttaatatttgtttgtgttttttttatttttagatttgttttaatatttgtttgtgttttttttatttttagattttgttttaatatttgtttgtgttttttttatttttagattttgttttaatatttgtttgtgttttttttatttttagattttgttttgatatttgtttgtgttttttttatttttagattttgttttgatatttgtttttgttttttttatttttagattttgttttaatatttgtttgtgttttttttatttttagattttgttttaatatttgtttgtgttttttttatttttagattttgttttaatatttgtttttgttttttttatttttaggttttgttttaatatttgtttgtgttttttttatttttagattttgttttaatatttgtttgtattttttttgtttttaggtttgttttaatatttgtttgttttagattttgttttaatatttgtttatattttttttatttttaggttttatgtatgttttgggagtttagttttttttgtggtgtagattttagtatttattaggtgtttgttttttttatttagtgggtttttttttgattgtgttgtttaataggagtttttagggtttttttgttgtttttgtggttgttagagtttttgtttttttgttttgttttttgttgtttttttttatttttaaatttttatttatgggtgtgattttatttttaggagggaagtattagggaagtatatagtttaagtgttatggagtttaggttttaggttttgtatggagtttgtgtttaggattgtagaggtagtgtgtggttattttgttgtggagtaggtttgggttttttgggtgaggtttattaaagttttatagtattgttatggtgttggggatttgggtttgtatttattttagtgggaggtagttagggtttttttttaggggatttttgtagatgtgttgagtgtagtttttttatgtattttttggatggttttaatttgattttgtggtgggtggggagatgagatatgtatatttttttttatgattgtttgtatttattttaggagttgttatgtaggttttttgagtattgggtatgggtattatttgttttatgttatttattgtttggttttttttatagggtttgtgtgtaggagtggtgagggtggttatttagtgttgatgtatttgtttttgatttatttgaaagatagatgatagtttttgggtagggggtgggggtagtttttgtttttttaatttggtagtggggtttatgtagagtggtagtttgttatgtaggatataggagggttgtttgtggttgtgttttgtgtggagttatgttggttgggggataggtggagtatggaaggtttgttgttgttagaggttagggaaggtggtagtaggtatgttttaggggttatggaggtattagtttgggttagttttttttgaggaaggaggtgattatggggagattgaggtaagagataggtattggtttatttttttgtgggtgttttgttatttggtatatagttaggattgggttttgttaggtttttttgaggagagttttttaattttatttggatttgtttattttttatttttgttgtttagggagaaggttgggaaagtttgttaggtgtttgagggtgttgagttttttgttatagtttaggtggaatttgtatgattaggaataaggttggaggttggatgggtatgtgttttgtatgattagggataaggttggatgggttgttgatgtgtgtagagtatgtgggtttttatgtagttgtttttgtgttatattgtgtttaggaggagttgttttaagtttagtaatttggaattttagagtaaaggtttttagtttagatttaagtttttagagtttttaatgtgggggttgttttgggtgttgtttttttatttgttaagtttaggtatatgtagatttgagtaggttttttgatgtttgatggtaggaaggaaattattttatagtgttggtgttatttgttattttagggaatgttt

SEQ ID NO: 226 - DNA, 2170 bp, Artificial Sequence
  chemically treated genomic DNA (Homo sapiens)
gtgatttttttttttaggatttagtagtattttattgtgttatagtagttagtatttttaaagtatatattttaatattttttggttgtagtatatttaatttttttgttggggtgtgggggtttttttttttttgagtatagtttttggttttttgattttttttgttttatttttttgttttttaagtatattgtgtttatttttttaggtagtttttttagtggttgggtagtagtagggttttgagtttgttttttttggggtggttatatgtgtttattttttggggttggggattgttttttttgtttggttgttgattggtgtttttttttattttattttttttgttgttttttagtttttattttattttgttttagtttaattagttttattgttttttttttttggagaaaaaagttattttagagttttttgggtgttgtttttggttggaataaaagtgttaagaaataggtggaaagtattttatttttttaggttttatatttttagggtggatagtttgtttttgttttggttttgtttttggtattaataataattgaatttttatatgtgtatgtttttgtttttagtttgattgaaaggattattttgtgggttttttaaaaggatgtgattatttaggttaagtgggggtgggagagtttttggttgtttttttttgggaaagtgttttaattttttagttttaaagttttggagggtggagggtgttttgtgagagtttttgggggtgtggtttgtgttttttgggttttgtggatttgggtttgggggtgtgtgttttgtttttttttttttttggtggtgtagttgtttgggtgggggtggggtgggggttggggtttgtgtgggattaattaggattggggtgggagttgattgtggttggtggggagggttagttttgttttggtgggtgggtgtgtggtaggggtttttggaggttttgagtttttgggaggtgttttggttaattttgggttggtggggattgggtttgggtgtggggttttgaaggtgtggaaggaaagtttgggattttgttatttttttatagtgtttttttttttgtaatatttagtttttttattgtggggtttgggagtttttggagttgattttgttattattatttttttgggtgagtgtggaggatgggttggttattttggttaggttggaggtgttttttagtttggggttttgtgataattgggttgaaatttgagggttttggagtgtggtgggtggtgggagtttgtggagtgtggtgtatttggtggttaggtattggttagtttagtggtagtttttttttttttatttttatttttatttttggaaggagttgagaattagttgattggttggtaggttgaattgtttttttttttatggtaatatgtgttgtgattttttattttttgtttttggataaaggtgaatggtaattgtgttggttagtttttgttttttgttttgtggatgggtttgttgatgtagtaattaaaattagagttatttttttggaagagtaaattgttgttgttgtttttttagttttatggattttattttgtgttatttttgggttgattttaatttgtttattttagagttttttgttttatttttatttttagatttagttgtgtttgttgaaatattagttgttttttttgtgaatgaagtgtgggaatttgtttttgttgtagttaatgaaattaggaaaataaaaagattaaaagggttggggatgggagaatgaagaggaatgtagatagatagtttagggttatttattggtttttggtgatttttagttttttaagttgattaaaataatgtgaggaaatgtgggtttttttattttttaggaagaggtaataatgggtattttatgtggtgttatagtgtttgtttttaaagtttgaatgtgaatgtagtaagtataattttattaatgaaaatattttttagataattgttaatattgatgaaagaagagaaatagagatatggaagttaaagagttgggaattttaaaggttaaaggatgttttttagttattttgatgttttgtgtttttttttagttggtataaaattgtgagtagtttaattatattttgta

SEQ ID NO: 227 - DNA, 2170 bp, Artificial Sequence
  chemically treated genomic DNA (Homo sapiens)
tgtaggatataattaaattatttatgattttgtattaattgaaagaaaatataggatattagagtaattgagaaatattttttgatttttaggatttttaattttttagtttttgtgtttttgtttttttttttttgttaatattaatagttgtttaaagaatatttttattaataaaattatgtttgttatatttatgtttaaattttgaaaataaatgttgtggtgttatgtaaaatgtttgttattatttttttttaaaaagtggagaagtttatatttttttatattgttttaattagtttaaggaattaagaattgttaaaagttagtgagtggttttagattatttgtttatatttttttttatttttttatttttaatttttttgatttttttatttttttgattttattaattgtgatgagagtaagtttttatattttatttatagaagaagtaattgatattttagtaaatatgattaaatttaaaaataaaggtgaggtaaagagttttgaaataaatgagttaaaattaatttgaaaatggtataaagtaagatttgtggggttggggaggtaataataatgatttgtttttttaaaagagtggttttaattttgattattgtgttggtgaatttatttgtagaatagaaaataaaaattgattaatgtagttgttatttatttttgtttaaaggtaaaaggtgaaaagttatgatatatattgttatagaagagaaggtaatttaatttgttaattaattgattaatttttagttttttttaaaaataaaaataaaaataggagaaagggggttgttgttgggttggttgatgtttggttgttgagtgtgttgtgttttgtaagtttttgttatttgttgtgttttaggatttttgggttttggtttagttattataaagttttgggttggaaaatatttttggtttggttagaatggttagtttgttttttgtgtttgtttggggggataatggtggtgagattaattttaagggtttttgagttttgtgataaagaggttggatattatgggaggaaggatgttgtggaagaataatggagttttaaattttttttttatatttttagagttttgtgtttaggtttggtttttattggtttgaagttggttggagtgttttttgggagtttggggtttttgggagtttttgttatgtgtttgtttgttagagtggggttagttttttttgttggttgtggttgatttttgttttggttttagttaattttatgtgggttttggtttttgttttatttttgtttggatagttgtattgttagggagggggaggggtggggtgtgtgtttttgggtttagatttgtaggatttagggggtgtgggttgtatttttgagaatttttatgaggtgttttttgttttttaggattttgggattggggagttgaagtatttttttaagggaggatggttaggagtttttttatttttatttggtttgagtggttgtgtttttttaaagggtttgtggggtggtttttttggttgggttagagatagaaatgtgtatgtgtgggagtttagttattattgatgttgagggtagagttggagtaggagtgggttgtttattttagaaatatgaagtttagagaagtgaagtgttttttatttgttttttaatgtttttattttagttgagaatggtgtttaaggagttttgaagtggtttttttttttgagggaagaaggtggtggggttgattgagttggaatgaagtaggatggaggttggagagtggtgggaagggtggggtagggggaggtattaattagtagttaagtgggaagagtgatttttaattttagggaatggatatgtgtgattgttttggagaagatgggtttggaattttgttattgtttggttgttgaaagagttgtttggaagagtgagtataatgtgtttggaaggtggggggatggggtagaggaaattgggaagttggggattgtgtttggaggggaggagatttttatgttttggtggagggattgaatgtgttatggttgaagggtgttggagtgtgtgttttagaaatgttaattgttgtagtgtggtggagtattgttaaattttaagaaaaaaaattat

SEQ ID NO: 228 - DNA, 2455 bp, Artificial Sequence
  chemically treated genomic DNA (Homo sapiens)
ggattttttattttggttgtagttttttgtgtagtgagaaggtagtggtttttgagagtttagtagtgttttgggagtttgtagaatgtaggggtggattttgtgttgtattggttgttaaggggtggttgtggagggaaggggtgggttggtgggtttgatagtgggtttgtgtaggtggtagtgtttgttttttttagttttttgttttgtgttatgggtgggttttgggttttgttggttgtattttgggtgttggaagttgttgggattgttgtgttttgtattggagtttttaatatttagagttttggtgatagtaaagtgttggattttgtttgtggtagtattattgtgaaggtggggtttgggttggggtggggtggtgtttaggggtgttgattgtgttgatttttgtatttgttgtttttttttagattttggttggttatgattttgtgttggtgtaggaggtgtgagatttagattttagtgttgtgtttgtgtttatggagtagattaataggtgtggtgggtagggttttttgttgtgattttttgttgggattttgttttggtgtggtgttttgattttgagtgggtttttgtttttatagtgtgtttgagtatgagtatagttttgtgagtagttagtttttgggttgggattagtataaggagatgtatttgtttgtgtataggtgaggggtgggttgtagggaggggtgtgtggggttgtaggttgggggtttagtgggttttttttattttttaggaaagatgtggtgttggttgtggatatttatttgtatttagattttgaggatgtttttagttgtgagttttttgtggttaagtttttggtttttggtattggtgagtgggttttgtttttttttttttgttgagttttgatgtttttatttttttttgtagtagtatagaatttggtgttgattttgttgtatgtggtgttgtattaagttgtggtggagattgatgtgttttatgatgtgtatttggatgtgattgataagtggggtattgatgtaagtttattttttggttttggggtttttgtaggtgtgttttgggggtttggtttatgagggtgggattttgatggtttttgtggtggtttagatatggttttgtggtgtttgtaggatatgttgtttttgggtgattttaatgttgattgtagttatgtgtgggtgtaggattgggttgttatttgtttgaggagtagtgaggtttttaagtggtttatttttgatagtgttgatattatggtgggtaatttagattgtgtttatgattgtattgtggtttgtggtgtttgtttgtgttggagtttgaagttttagttggttattgtgtatgatttttaggaggaatttggtttggattagatttaggtgagtgggttgtggggtggtgttggttttgggtttttattgtttgggtgtatgtaggtagtagggagggtttagtgtttaaggtagggttattttagttttttttttgtattagggtttgtttttaaggattttggagagtttggtttattttatgtggagttttgggtaggtagggtattttgttttttttttaaagggttaatggtgatattttttgttttggtttttgtttttgttttattgtaggtagtagtaggggtgggtatttaggttttattggttttttttatttttgtgggtggggtgtattttttttttgaggtttattttgtttttataggtttttgttattagtgattattttttagtggaggtgatttttaagttttattgatgatttgaggtttggttggggtatgttatttgtagattttggttttgaggaatggtttaatagtggtttttttagggtggtagttattttttagtgaggttttaaggtagagttggttgggtgtggattaggggttatggatatgtgatgtgttgttttgtatttttgttttttatttgtgggatgggttgtatttagtgattttatggggtgttgtgagttttatgaggggtgtagggggtattgtttggtagatgtttgtttaataaatgagttgtttttggttgggttttatagtttggtttttaggtttttgtttttttttaggatttagttttagttttttaggggtagttatggtttgggttgtttattttatgttttggtgggatgtggttgtttttggagtttgttggttttagaaggtagtttagggatgttttttgtttattttttgtggaaattataaatgtttttaggagtttgtattgtgagtatagttgggatagggatggtgttaatatattagttttttgggtttttggggtttttagaatagttttttttaggtttattttgtagtttttattttagggttttgtaggggtttttaggtatttgtttgttttaagagtttggt

SEQ ID NO: 229 - DNA, 2455 bp, Artificial Sequence
  chemically treated genomic DNA (Homo sapiens)
attgggtttttgagatagataagtgtttgggggtttttgtagggttttggaatgggggttgtggggtgggtttggggagagttgttttgagagttttgagggtttaggaggttggtgtgttggtgttatttttgttttagttgtgtttatagtataggtttttgggagtgtttgtagtttttatagaggatgagtaaggagtatttttgagttgttttttggggttagtaggttttgggggtagttatgttttattaggatatggggtgggtagtttaggttatggttgtttttaaggagttgaggttgggttttgaggaaggatagaggtttgggagttaagttgtggggtttgattgggagtagtttatttattgagtagatatttgttgggtagtgttttttgtattttttatggggtttataatattttatgaggttgttggatgtagtttgttttatagatggggaatggaggtatagagtagtatattatgtgtttatggtttttggtttatgtttagttgattttgttttggggttttattgaagggtggttgttattttgaaggggttattgttgggttattttttagagttagggtttgtaggtggtatgttttagttaggttttgagttattggtggaatttgagggttatttttattggaaagtggttgttgatggtaagagtttgtggggatagagtgaattttaggggaaaagtgtattttatttatagggatgggaggggttggtgaggtttgggtgtttatttttgttgttgtttgtggtggggtaggggtaggggttggggtagagggtgttattattggttttttgagggaaaggtaaggtattttgtttgtttagagttttatatggggtgggttgggttttttagggtttttggaaatgagttttggtgtagggaggaagttgaggtggttttgttttgggtgttggattttttttgttgtttgtgtgtgtttgggtggtggggatttaagattagtattgttttatggtttatttgtttgagtttggtttaggttgaattttttttggaagttgtgtatggtggttgattggggttttaggttttggtgtaggtgggtgttataggttataatgtggttgtaggtgtagtttgagttgtttattgtggtgttggtgttgttagggatgagttatttgaagattttattgttttttagatggatggtggtttagttttgtgtttgtatatagttgtagttggtgttgaagttgtttaggaatagtatgttttgtgggtgttgtggagttgtgtttgagttgttgtaggagttgttgaggttttgtttttatgaattagatttttggggtgtgtttgtagggattttgggattgaggggtgggtttatgttggtgttttatttgttgattatgtttaggtatatgttgtagagtgtgttgatttttgttatggtttgatgtggtgttgtgtgtagtgggattagtattaggttttgtgttgttgtgggaaggggtgggggtgttagagtttggtgggaggggaggggtggggtttgtttattggtgttgggggttgagaatttgattatgaagggtttgtggttgaagatgtttttggggtttgggtataggtaggtgtttatgattgatattgtgttttttttaggagatggggaggatttgttgagtttttgatttgtggttttgtgtgtttttttttgtggtttgttttttatttgtatatgaataggtatatttttttgtattggttttggtttaggggttggttgtttataaagttgtatttgtgtttggatatgttgtggagataggggtttgtttagggttggggtgttgtgttggggtgagattttggtggggggttgtgatgaggggttttgtttattatatttgttgatttgttttatgagtgtggatatggtgttgaggtttgggttttgtattttttgtattagtgtgaggttatagttagttaggatttggggaggagtggtgggtgtgggggttagtgtggttagtatttttaaatgttgttttgttttggtttgggttttatttttgtgatgatgttgttgtaagtggggtttgatattttgttgttattgaagttttgaatgttgaaggttttgatgtgaagtgtggtggttttggtggtttttagtgtttagagtgtggttagtagagtttggggtttgtttatggtgtggagtgagaggttgggagggatagatgttgttgtttatgtagatttgttgttagatttattgatttattttttttttttgtggttgttttttgatggttagtgtgatgtggaatttgtttttgtgttttgtaggtttttagggtattgttgggtttttagggattgttgtttttttattgtgtgggaagttgtagttggaatggagggttt

SEQ ID NO: 230 - DNA, 2377 bp, Artificial Sequence
  chemically treated genomic DNA (Homo sapiens)
ttttggttgaagttgtggggagggggagtgaagtagtttggattgaataggatatattgaaggggaagtagtaagagtggtgagtggtattatttgatgtttaagtttagtaggatttgtttttttttttgatttgggtgaattttgattttaatgatgtgtaatggttagggagagagaaatttttgagagagggtagggatagggagaagtatttgagtttattttgggttatttattttttttagtttatttttttatttttttttttttatatatatttttttatttagttttatttgtgtaaatgtaaatgtttgtagatgggggttagattttttaatagttggagttatagttttagttagaagtttttttatatattggtttaggaagggttagatttgggttataatttgggaggaaagagagatggttagaggagagtttagtttttttttttaaggtaagtttttttagaattttttttatggagagtattgagggttgaggatgggtttggtaagaagaaataaatttttattttttttttatgaagattaaaaattaaattaatttttattttattgagttatttagttttttttatgtttgggaagttgatttggaggtggggaaggtagagatagtgatgtgtagtatatttttgtttttggttttttattaagatgttggtggtgtgttatagaggagagggagtgtgtgtgattttttatatttagggtgggtgaggggtgaggatgttttaaaggtttattttttatagagtttgggggttgatgtttttttaataaggggagttgataaggtagaggttatgttgttgttttgtggatagtttagggatgtggtgaaatgatagttgttgagagagagaggagtgggaggaggagaagggtgtattttttttggagggggaggtttagttaaattggagtttgagggaattttgggatttaaaaagttttggttttaggttggttgtggtggtttgtatttgtaattttagtattttgggaggttgaggttggtggattatgaggttaggagtttgatattagtttgattagtatggtgaaattttgtttttattaaaaatataaaattagttgggtgtggtggtgtgtgattgtaattttagttatttaggaggttgaggtaggagaattgtttgaagaggtagaggttgtagtgtgttaagtttgggttattgtattttagtttggtaatagagtgagattttgttttaaaaaagaaaaaaaaaaaagtttttttttttagtttttttaattttttttagatggggtttttagagtaggaaggtgaagagggaagtaagtttttttttgagttagggaggggttagaagatttaattaggtttggttttgtgggttttttggggtgtgtgtgtgtgtttttttttatttttttttgtgtgattttttttaagggaaaggatatttgtgttttgtattgggggtaggaagattggtttttatgatgatgaggaggagataaatatttgttgtttaggttataggttttttagagttatttggttttttttttttttttttttttagtttagggtttgggaagtttggttgtgtttgtttagtgttaattttgatttttttttgttgttattttttttttagattggtatttttgttgggaggggttgggtaattggttttgtttttgtaagattagagagaaggtatttgttttagtataggagatgtggttgttgtagaaataagggtttttgttttaatggaataagtgtagtttatagtttggaaaagggtgtggttggttgaggagtgtgggggagtgtgtgttgtgggtattgtagtagttgtattatttttttttgtagttttttttttgtttagtagttgtttttgttgtgttgtagtttggtggttggaggtttgaaggtggttgtttgagggttgtttaggggttggggttgggttttagtgggtatttggggataaaagtgagaaaagagagaattgtatggttttaagtaggtaaaaagttttgaggaggatgggaaagattagggaaatttttgagaggtaatgggattaggatttttaggagtagtaaagttgtgagtggtattaaaagtaagagggatgtttaagatggtttggttaggagggagagttttggttgagatggggtttttagatgttattattgttgttgtttaagtagaggaagaagttttgattttgtggaaggatttagtttgggtatgtgaaagggtgggtggggagagtgagtagttggttttaagagtggtgtgtttagtaggtaggtggttagtggggagagagggg

SEQ ID NO: 231 - DNA, 2377 bp, Artificial Sequence
  chemically treated genomic DNA (Homo sapiens)
tttttttttttttgttagttgtttgtttgttggatgtgttatttttggaattgattgtttattttttttatttatttttttgtatgtttagattggatttttttatagaattaggatttttttttttatttgggtaatagtagtaataatatttggggattttgttttagttgaagtttttttttttagttaagttattttgaatgttttttttgtttttggtgttatttgtggttttgttgtttttggaaattttggttttgttattttttaaaggtttttttagttttttttattttttttgagattttttatttatttaaagttatatggttttttttttttttgtttttatttttgggtatttgttaggatttagttttggtttttggatgatttttgggtagttatttttaagtttttagttgttagattgtagtgtggtagaggtggttgttggatggagggagggttatgggaggaggtggtgtggttgttgtagtgtttgtggtgtatatttttttgtattttttggttggttatatttttttttggattgtgggttgtgtttgttttgttggggtagagatttttatttttgtggtggttgtgttttttgtgttgaggtggatgttttttttttagttttgtagaggtgaagttggttatttggttttttttagtagaggtgttagtttagggggagaatggtagtagagaggaattaaaattgatattagatagatatagttaagttttttaggttttggattggaaaggggaggagaaagagggttaaatggttttaggggatttgtagtttaggtagtaagtgtttgttttttttttattattatggaaattaatttttttatttttaatataaagtgtaggtgtttttttttttaaaaggagttatatagagaaagatagaggaaaatatatatatatattttaaaaaatttataaagttaggtttaattaggttttttggtttttttttgatttaaggaaggatttgtttttttttttatttttttgttttagaagttttgtttgaggggagttgagaaggttggaaaaggggattttttttttttttttttttgagatggagttttgttttgttgttaagttggagtgtagtggtttgaatttggtatattgtaatttttgtttttttaagtgatttttttgttttagttttttgggtagttgggattatagttatgtgttattatgtttggttaattttgtatttttagtagagatagggttttattatgttggttaggttggtgttgaatttttgattttgtgatttgttggttttggttttttaaagtgttgggattatagatgtgagttattgtggttagtttggaattaggattttttaaattttaggatttttttaaattttaatttgattggatttttttttttagaaagaatgtgttttttttttttttttgttttttttttttttagtagttgttattttattatgtttttgagttatttatagggtaatagtgtgatttttattttgttagttttttttattagagagatattagtttttaaattttgtgaggaatgaatttttggggtatttttgttttttgtttattttgagtgtgaggagttatatatatttttttttttttgtggtatattattagtattttagtaggaaattagaggtgagggtgtgttgtatgttattgtttttgttttttttatttttaggttagttttttagatgtggaaaaggttgaatggtttaataaggtgaggattgatttgatttttagtttttatgaggggagaatgggaatttgtttttttttgttagatttatttttaatttttagtgttttttgtggggaggattttgaaggaatttgttttgagagggaagattggatttttttttgattatttttttttttttttagattgtggtttaggtttggttttttttgggttagtatatggagaagtttttggttgaaattgtggttttggttgttaggggatttaatttttatttgtaaatatttatatttatatgagtggaattgggtgaaaaggtatgtgtggaggagggaaagtgaggaggtaggttagggagggtgagtggtttggagtagatttaggtatttttttttatttttgtttttttttaggaatttttttttttttagttattgtgtattattggagttaaggtttatttaggttagagaaaagagtagattttgttggatttgaatattaggtaatattatttattatttttattgttttttttttaatgtgttttgtttagtttaggttattttattttttttttttgtaattttagttaagg

SEQ ID NO: 232 - DNA, 3687 bp, Artificial Sequence
  chemically treated genomic DNA (Homo sapiens)
gtaagtttttttttttggtgtataggtatgtagttataggttaagttgtgatgtgagttttgtgtgtgggatttttgtaaaaggtttgtttgatgtgttgggtgggaattgagtttgggttaattgtttggaaggtaattatgtttattattatattattaatgttgtatggtgtgggtagttttgttgtgttggtttggggtttttattagtgtgttgttgatgtttggggtaggttggttttgatgtttggtttgtttgtttgtttgtagttttgtgttgttgtggtttttttaaaggttgttttgtgttttattggtgtaaggttagtgtggttgatttgttatgtttgtttgtttttgggggtgtttttgtttatttgttgttttgggtttttagagtttttttttaataggtgtttgggggggaaatggttggtgttggtagggtttttatttttatgttttttattgggtgtagggttttgtgtgttgtagaaagttttttttgataattattttgagttggtagtttgttgggtgttgtgtagggttagaggaggttttttggttgttgttattaagttgtggatgagaagaaaagataggaggttaaggaggtttagaaggttaaagggttaggtaggttaggtttgagatggtattttgtgattagttggagggtggaggaaggagaaggagggtttataggttgggtttgaggtggtggtttaaaaagtatggttgtttttttgttggggaattgaattttggttttttgtgtgataggtggggatatttattattatattaatgaggatgatggtgatggttgttgggatgttagattttattttgattgtggatgtttagttttgttttgatttttttttttgatggtaggggttgggtgtgtgtttgttttttatttgttgtttgttgtttgttatttgttatatgttatttgttatttgttatttgttttttgttattgttggtatgatttattttgatatttaataaagtattttgtgattttgttgggatttggagttggagttggattttgataggtattggagtggtgtggaatttttttgtgtgttttgtttgttgtttttaatgtggggattgtgttggggtaggaggaggtgtgggtgaaatagttaggttgttgtttttaggatgtggtgggtgtatgttttgtggggtttggtgagtggaggtgtgggggttggggtgtgtgttggtggtggttggtttgatgtggattttttgggtttggggtggggatgtgggggtgtttatgttaatgttagttggttttgtttatttggtgtttgttttttttgtgtggtttgttggttgtgtattgaatttagataggtgttggttaagggtgtaggtgtttgtgttgggttttagttatgttagtggtgaagtgttttggtgtgttgttaggatggttgagtggtttaaggtgttgtgtttaggttgtagttttttttggaggtgtgggtttgaattttatttttgataagttgattttttggtttgtttgttggagggtaatgtttatggtaattttggagtatttttggttgttttttgttttgagtttttgtttgttttttagattttagtttttttgaagtaagtttttaaaatgttgttgttttttaggtatgtttgttttttttgtttatttgttggttgttgtagaaatagtttaggattatgtgttagtgtttgtgattttttattaattgttttttggatagatgttttttttattattttatatgtttttttttttggttttatatatagtgagtgattgtgattattttttatgtttttttttgtttattttttttgtttgttttttttttatttgtttaaatagatatagtttagattttttttttatttttttttttttttttttttttttattggtttttgtttattgtttattgttttgaattgttgttgtgttgtttagaggtgttttggtttgaatagtttgtttggttttattttttaatttttgattgttgagtagtagtgagtgatttgtttgtggagttgtatatatgttttttattagaggtatgttatttaatattttgtttttttttttgattttttggattttggttgtgtattttattttgttgatattttagttaggttgttgattttattttgttatttgtgttttttttttgttaatatttgtttgttggtttatttgtagtttggatgtttgttggttagaggtagtgggaattttgtatatagttgggtaggtgagtttaaatttggaaagatagtttaagaggaattatgagtggaagttttagatttttgttatttgtttataaatgtttggttttgttgggattagttttgtgttatagtgtatttttatgtgggaagttgtggtttgggttgttttagttatatttagtgtgttttttttagggttagttagttgtggttttgttgaagtgtttttttgttttttttttgtgttttagtttttttattagtttagggggttggattttaagtgtgagttggtggtgtgggttagagtgtaggagtgaggtgtttatggatttggtttgtgtttttgagttgtatgttatggttgtgagatttgttttttattgttgtttttgtttgttgatatatttattttgttttttatttgttggtgatataagtgagaaggttggttttatggtggtgaaaaaaaaaaatattatatgaaagaaagaaagaaagaaagaaagaaagaaagaaagaaagaaagaaagaaagaaagatagaaagaaataataaaaataaaatataaaaattttgggtttgtgttggggatttgtgtttagtaaggtttgttatagtaaatttgtttatatgggtatttgggtgtgggttatggttggttttttttttggagattttggtgggtagttttttgattttgggtggtagagaaagtgtaagatgggatgagttggtttttttttttttgttttttttttgtgttttgttttaggttttttgatgtgatgagagtttttttttttgtttgttttattgggttagttttttgtggatgttgtaataggatggaggtttatggtaggtggtgattagtgaatggtggttggtggtgagttttgttgtgttagtttttgttggtgtttgttattggtgtatgggtggtttagtggtagaatttttgtttgttatgtgggaggtttgggtttgatttttggtttatgtagtatgtttttttattttggtgttgtagtagtattaaggtgtagttgtgtttgtttttgttgtttttttatatttggggtgtgtgagtgagtttggtattggttgtgtttttatgtgtgatggttttttgtttttttttttgtgttttttttgattgatttagggatgagtttattttttgtatttatatattttggtgataataatttttttagatatgagagtgtgttagatattagaatttggtagttttttggttttgtttttttttattgttttgttattgtttttgtttgatgtattttattttatggaatattgttaggtattatgggtttgtagttatttgtattattttttttttttatattttattgttttgatttttttt

SEQ ID NO: 233 - DNA, 3687 bp, Artificial Sequence
  chemically treated genomic DNA (Homo sapiens)
gagagaggttgaggtggtgaaatgtgaagagaaggggtggtgtgagtggttgtaagtttgtggtgtttggtggtgttttgtgaagtgaaatgtgttgggtagaggtggtggtagggtaatgaagagaaataggattaggaggttgttaagttttggtgtttggtgtgtttttgtgtttggaggggttgttgttattaaggtgtgtgggtgtggggggtaggtttatttttaagttagttgagagaggtatggaagaaagggtagagggttgttgtgtgtgggagtgtagttggtgttggatttgtttgtgtgttttgagtgtaaggaggtggtagaggtgagtgtagttatgttttggtgttgttgtagtattaaaatgggagggtgtgttgtatgggttgggaattgaatttgggttttttgtgtggtaggtgagaattttattattgaattatttatgtattgatggtaaatgttaatggaagttggtatagtggaatttgttattagttgttgtttattggttattgtttgttgtgggtttttgttttattgtagtgtttatgagaggttggtttgatggggtgagtagaaggggaggtttttgttatgttgagggatttgaggtggggtgtggagggagagtggagggagagaggttgatttgttttattttgtgttttttttgttgtttagggttgagagattgtttgttggggtttttaggggaaggattggttgtggtttgtgtttgaatgtttgtgtgggtagatttgttgtggtgggttttgttgagtgtggatttttggtatagatttagagtttttgtgttttgtttttgttgtttttttttgttttttttttttttttttttttttttttttttttttttttttttttttttttttttttgtgtggtgttttttttttttattattgtggggttagtttttttatttgtgttattagtaggtgagaggtgggatgggtgtgttagtgagtgggggtggtgatggggaatgggttttgtagttgtggtgtgtggtttagaaatgtagattaggtttgtgggtgttttgtttttgtgttttgatttatgttattggtttgtatttggggtttggttttttgggttggtagggaggttggagtgtgagaaaggagtggaggagtgttttggtagagttgtagttggttgattttggagaaggtgtgttgggtgtggttgggatggtttaggttgtggttttttgtgtggggatgtgttgtggtgtagagttggttttggtggggttaggtgtttgtgggtgggtgatggggatttagggtttttgtttgtgattttttttgggttgtttttttgggtttggatttgtttgtttggttgtgtgtagggtttttgttgtttttggttggtaggtgtttgggttgtaggtgggttggtaggtaggtgttagtgggaagggagtataggtagtgaggtgggattggtgatttggttagggtgttggtagaatggaatgtgtggttggggtttgaggggttggaggaaaggataggatgttggatggtgtgtttttggtgggagatgtgtgtgtggttttatgagtgagttgtttgttgttgtttagtggttagaagttggagggtgaaattgggtgggttgtttaggttaggatgtttttgggtagtgtagtggtgatttaaggtggtgggtggtgggtggaggttggtgggaggaaggagggaaaaggaggaataggggaagaatttgggttgtgtttgtttgggtgagtgaggagaaggtgggtggaggagataggtagggaagagtgtggaaggtggttgtggttgtttgttgtgtgtggggttagggaagagggtgtgtgaggtggtggggagggtgtttgtttgaagggtaattggtagagggttgtgggtgttggtgtatggttttgggttgtttttgtgatagttggtgggtgggtaggaagaatggatgtgtttgagaagtggtggtgttttggaggtttgttttaagggggttggagtttggagagtgggtaagggtttaaggtaggaagtggttaaaggtgttttagggttgttatgggtgttgttttttggtgggtgggttaaaaggttggtttgttaggagtgggatttgaatttatgtttttaggggagattgtgatttgaatgtagtgttttagattgtttggttattttgatggtgtgttggggtgttttgttgttggtatggttgggatttggtgtgaatgtttgtgtttttggttggtgtttgtttgggtttggtgtgtaattgatggattgtgtggggggagtgggtgttaagtgaatggagttggttggtgttggtgtggatgtttttgtgtttttattttggatttaaagggtttgtgttgggttggttgttgttggtgtatgttttagtttttgtgtttttgtttgttgaattttgtagggtgtgtgtttattgtgttttaggagtagtggtttgattgttttgtttgtgtttttttttgttttggtgtgatttttgtgttggagatagtaggtagggtgtgtggggaggttttatgttgttttggtatttgttggggtttggttttggttttgggttttagtgggattgtagggtgttttgttgggtgttggggtaggttgtgttaatggtggtggggggtgggtggtaggtgatgggtggtgtgtggtgggtggtgggtggtgggtggtgggtggaaggtgagtatgtgtttggtttttgttgttgggggaggggattaaggtagggttaggtgtttgtggttggagtggggtttggtgttttggtgattgttgttgttgtttttgttagtatagtggtgagtatttttgtttgttatgtgggagattggggtttgattttttgatggggaggtagttgtgttttttgggttgttgttttggatttagtttgtgggtttttttttttttttttttgttttttagttagttgtagggtgttattttgggtttggtttgtttggttttttggttttttgggtttttttggttttttgttttttttttttgtttgtggtttggtagtggtagttgggaggttttttttggttttgtatggtgtttaatgagttgttggtttaaagtggttgttggaagaggttttttgtgatatatggggttttgtgtttggtgggaagtgtaggagtggggattttgttggtgttggttgttttttttttgggtatttgttggggaagggttttgggggtttgaggtggtgagtgagtgagagtgtttttagaggtaggtgggtgtaatgggttagttgtgttggttttgtattggtggggtgtggggtggtttttggagaggttgtggtagtgtggagttgtgggtgggtggatggattgggtgttggggttggtttgttttgggtgttggtggtgtgttggtgggagttttgggttggtgtggtggggttgtttgtgttgtgtggtgttggtggtatagtggtgagtatagttgttttttaagtagttgatttgggtttgatttttgtttaatgtattgggtggattttttgtggagattttgtgtgtggagtttgtgttgtagtttggtttgtggttgtgtgtttgtgtgttggggaaggaggtttgt

SEQ ID NO: 234 - DNA, 2409 bp, Artificial Sequence
  chemically treated genomic DNA (Homo sapiens)
taaggtttgggtatttttaggtagtagggataaggtgggttttttttttggttgttaaatttatgttaaagttgagtttagggattggagtttaagaaatttattgtttattttttagtttgattggggatttgtatgtatttttgttgtgttgttttgagttttttaattttttatattttttttttgttatgtatatgtttttatttaggtttgtaaaagttttagtttttttgtaggggtagggatttgtatgttggtttagggtttggtatgtggggatgttgaaatagggttaggtttggtttttagttgattgttagagttttaaggtttagtaattttttttataaaggttttgttaagaggtgaggaaataagagttgggagaggggtgtggaatggtgggtgggatgaatgattagttttgtgtttttggttagttgtgttgagttaggggtattgtggttgttgtgtggttggaaatttaggaatgggaaggtttggggtttgtttggttttggaggtagttggtgggttgtttttggtggtgttggagtggttagtggtagttgggtatgggtgattgggttgtttgggttgtttttagattgtgatttttgaaaaattttgtgggtggggtgtgtttgtgttgttttttgttggaaggtgtgagttagtgtgtttgattgtgggtgggggtggaaagaggtgtgttttaaagtggtaatagatggtttttttatttaataggattaaaaaatttgtttttatttggttgattgtggaagtagagtaggtgggtggttaatggggatatgatggggggtggagttgaggtttttgaagtggaagtgggttgttgttgaggtggtggtattttttttgaggagtttttttgggtggttgaagaaggagttttttttttggagtgtgttggtggtggtgtttgtggatttaattagttttaggttaggttgagttttgtgggaaagtagtggtaagttagggttttgtagatgtgaggtttaggtagttttgtggtttatagaggttttggtttgtgttttttgggggagttgtgttgtgtggtttgatttagttgaggttttgtagtttgggattttgagttagttttggttgtttgtattgttgtttgtgtgggtgtattgagtttggtttggtgtgggtaatagaagttaggaggtttgtgtttgggttttggtttattttggggggttgtggttatggggtttagtttttagtttaggaagggaaattgagattttgggaggggtaggaatgtttttaaggttatttggaaagttgggtaggatgtgttgttagggggaagatttgggtagggtttttgttttttgttgatgatgttttttttgtgtgtttgtgttgttgttttgttattgtggggtttgtgagtttgttggggtgtgtgggttgtgtggtggggttttttgtaggttgggaggatttgagtatgggtgtgggtttgattgtgggggtgttgaggttgtagtttaaaatttagtagggttttgatttttgggtgtgtttttgggttttggttggtggttggtggaatgtgtgattgtgaggtttgtggtttagttttgtattgtttgggttttttattgttttggtgtgtttatagataggtgtatgaagatttttatgatttgaaatagagttgttagtaaatattgtttttttgtttttgatttattgagggaagagggaaaaggatagagtttgggtaagttgttttggtagggattttagtttttgttttttatttgttagtttttatagatgtttataaatttaataatttttgttttgtttttgtattaagtttttgagttagatgtagggttttagttttggagtttggtttagattgtttaattgattggggagattgaggtttagaaaagtgaagtggtttgtttaaggttatatagttagttatttggtagtagatgaggttaagttttatttgtaagatttgggttttgaatttattgattaggagttttgggattattgttaataaaagagatattgaagggaattttttgttatttttttggtgatttgttttttaatggataaggatatattgggtttagttttatttgtgagtttgaggtgaaatagaggtatttgagtagtaagatatattgttggtttttgtattgtttgaatttgagtttttaaaaattttattttaatatattgtttattgatttttttttgaattattatttttgtaaggattttttgtaaatattgtttttttaatttttatgaaattttaatgttatatgtaaattatttttttttatataatgtatgtatatttgtgttttgtatataaaatgagtaagattt

SEQ ID NO: 235 - DNA, 2409 bp, Artificial Sequence
  chemically treated genomic DNA (Homo sapiens)
aaattttatttattttatgtataaagtatagatgtgtatatattatataaaaagaaatagtttatgtatggtattaagattttatgaagattagaaaaataatgtttataaaaggtttttataaaggtagtaatttaagaaaagattaataaatgatgtgttaaagtaagatttttggaagtttaaatttaggtaatataaaagttagtaatatattttgttatttgaatgtttttattttattttaaatttatagataaaattgaatttaatatgtttttgtttattaaaaagtaaattattaagaaagtaataaaagattttttttaatgttttttttattgatagtggttttaaaatttttggttaatgaatttaaaatttaaattttgtaggtaggatttaattttatttgttgttaaatagttggttatgtgattttgggtagattattttatttttttggattttagtttttttagttagttggatagtttaagttaggttttagagttgagattttatgtttggtttaagaatttggtgtagaaatagaatgaagattattaagtttgtgaatgtttatgggaattgataagtgaaagataaaagttgaaatttttattaaaatggtttgtttaagttttatttttttttttttttttttgatggattaaaggtggaaaagtggtgtttattagtaattttgttttgggttgtgagaatttttatatatttgtttataggtgtgttagagtggtgaagggtttgagtggtgtagggttgggttgtaagttttatagttgtatgttttattaattattagttggggtttggaagtgtgtttggaaattgaggttttattaagttttagattgtgattttggtgtttttatggttaggtttgtatttgtatttagatttttttgatttataaaaggttttgttatgtggtttatgtattttggtaaatttgtaggttttatgatggtggggtggtggtgtgaatatataaaggaggtgttgttagtggggaataaaaattttgtttgggttttttttttaatagtatattttgtttgattttttaagtgattttgggggtgtttttgttttttttagagttttagtttttttttttaggttaggaattaagttttatggttgtggttttttagggtgagttgagatttagatgtagattttttaatttttgttgtttgtgttaagttgggtttggtgtgtttgtgtggatggtagtgtgagtgattagagttggtttgaggttttgggttgtaaagttttggttgggttaagttgtgtagtgtggtttttttaagaggtgtgggttgaggtttttgtaggttgtgaagttgtttaaattttgtatttgtaaggttttgatttattgttgtttttttgtaaagtttggtttaatttggagttagttaggtttgtaggtgttattgttggtgtattttggagaagaagttttttttttagttgtttaggagagttttttgagaaagatgttgttgttttaatagtaatttatttttgttttggaggttttggttttgttttttattatgtttttattggttgtttgtttattttatttttgtggttggttgggtaaggataaattttttaattttattggataagaaaattatttgttattattttaaaatgtgtttttttttgtttttgtttataattgagtgtattaatttgtattttttggtaagagatggtgtgggtgtgttttgtttgtaaggttttttgggagttatggtttgagggtgatttgggtgatttggttgtttgtgtttggttgttattgattgttttaatgttgttagggatgatttgttagttgtttttggagttgagtaggttttgaatttttttatttttagatttttagttgtataatagttgtggtgtttttggtttgatgtagttggttggaggtgtggagttggttgtttgttttgtttgttgttttgtgttttttttttggtttttgtttttttgttttttaatgaggtttttgtgaggaaggttgttgggttttgggattttgatgattggttggaaattaggtttggttttgttttagtatttttgtgtgttaagttttgggttggtgtgtgggtttttgtttttgtgaggaagttgggatttttgtaggtttgggtggagatgtgtatataatagaggaagagtgtggaggattggaggatttagggtagtatggtagaggtgtatgtaggtttttggttggattggagaatgggtggtgggttttttgagttttagtttttgagtttgattttgatgtgggtttagtaattaggaaaaaagtttattttgtttttgttgtttgagaatatttagatttta

SEQ ID NO: 236 - DNA, 2356 bp, Artificial Sequence
  chemically treated genomic DNA (Homo sapiens)
taatatatattttttaaggtaattaaagggaatatttatttttgtttgaggaaaaaatattttgtaagttaaaatttttattaatatagtattttattatatgattttttttttttattttaaaataatggggtttaattttttgaagtgtagtttttttagtaataaaggtggataaatttgtttttttttgtaagtagatattttttaaaggtaagaaagggaagattttgttagtttagtttattatagttaatgttttttttattaagtgtttaattgttttgaaagttagatgttttagaaagttagatgttttatagttgttttggtggtaattattttaagatagtggtattaaaggttttgatttttagtttttttatttaaaaaatggggatattaattattttataataaagttttgatgatataatgagattataaataaaatattttgtgatgtttgatttattatttaattaaaatttttataatggatttatatttttggtttagttattatatattttgttaagtggtttttttttaagaaaaattggggatgggggggttaggggggtgggagagtagtagggagtaggaggtagggaaggaggaaaataagtaaaattagtatatatataagtttttttatttttgattgtttgtgttttttgtgttttttttttttaagtttttttaggtttatgttttgaatttttttttttataaatgaaatataatggatatgaattatagagaattttatggaagatattggagtttaagtttgtagattagttttttgtttataagtggaggtgattggaaaattaagttaaataagtgttggataattttaaatagttaaagaagttttaatgggatagggtttaggtttattaaaggaggtaatattagtaattgatgaaattatagtgatggttgattgattatgatttgaggtataagatgttaaatttaaggttattaattaatgtgtgtaagaagtggttttaattgatttgggtgatgttaattgtgtaattattggttgttgtgttattttaggtttaggaatagtttagtttgtaatagggagattttaattagggagaggaggagtggggtaaaggggttgggtgttttttaagttgttgtgtgggatgtggaagggatgaaagaggtgaggaagagtagtaaattaatttaatatatttatatttttgttgtgtttttaggattatgagaagtgggtagggggtgatttttggttttttttattttgtaaaggtttttaattgggttttttggttaattttttagttattgttattttgaaattttgtgtttttttgtattttttatgttattttttatttttttgttttgtttttttttagtgttgtttgattttggaattatagagaatatttaagaattttaggattagagttttttttggttttatataatatttaattggttggttgttggttaagagtttgttttattgtgtttatttagtataataggaattagaagaagatagttgttaattgagtggttgatggttttgttttttgagttggaggtattttgatttagttgttgggagtttggtatgttgagttgtttgagaatggtatattttgtagataaagaagtgttttgtgttttttgttttttggaattattttagtttttgtatttttttgttttttatgatttaagtaggtgtgattttttaggggtgtttttgtgtgtaaatgaatatttagataatatttgttattgagtttaatttgttttgtaagtattaggttattttatgtgagtgtttagtatgtgtggaaatttaatagataggtagaatagaatgtttgtagattatttgaataaataaattagtatttgtattagagttgtagattgtttatatgggtggtgatttattatttgttagtagtgttttgaagaagaaatatggggatatatatgtagttggttttaagttatatgagtggtaaggttgatatatattggttatatttttgattggtttttttattagttaaaagttttttatgatgttattttatgtatgggattttttatttaattttagtttttgttttttttttattttttattttttttttttgtgagttagtttttatttattttttttaaaggtaagtttaaatatttaaaaaattattttagaggatatgtttggttatttttaattttaatttgattattttatgtaggaaggttatttttattattagttataaatattttaaaatattgatggagatatatattaatttttagtagaatttttaaa

SEQ ID NO: 237 - DNA, 2356 bp, Artificial Sequence
  chemically treated genomic DNA (Homo sapiens)
tttaaagattttgttaaaaattagtatgtatttttattaatattttgaaatatttataattggtggtaagaatagtttttttatatgggatagttaggttaagattagaaataattaagtgtattttttaagatagttttttaaatgtttaaatttatttttaagggaaataagtgggggttgatttatggaaagaggggatagaaggtagggaaagggtgaaggttagagttaagtgaagaattttgtatgtagagtgatattatagaggatttttggttggtgaaaagattagttgggaatatagttaatatatattaattttgttatttatataatttaaaattgattgtatatgtatttttgtattttttttttaaaatattattaataaataataaattattgtttatataagtaatttgtgattttaatatgggtgttaatttatttgtttaggtggtttataaatgttttgttttgtttgtttattaaatttttatatgtattaggtgtttatatgggataatttgatgtttataaagtggattaaatttagtggtaaatgttatttgggtatttgtttatatatggagatatttttaaaggattgtatttgtttgggttataagaaatagaaaaatgtaaaaattaaggtaattttaaaagatagaaaatgtagaatgtttttttatttgtagaatgtattgtttttggatggtttaatgtattaggtttttagtaattaagttaagatgtttttaatttgagagataggattgttagttatttagttagtagttatttttttttaatttttattgtattagatgagtgtaatgaggtgggtttttagttgataattaattaattgagtattgtatggaattggaagagattttggttttggaatttttgggtattttttatggttttagggttaagtggtgttaagagaaggtgggatagaggaatgggaaatgatgtgaggagtgtggaggggtgtgaggttttaagatggtggtagttgaggggttgattgagagatttagttgaaggtttttatgaagtgaaagaggttgggagttgttttttatttgttttttgtagttttgggagtatagtagaagtgtgagtgtattgaattgatttattatttttttttattttttttgttttttttatgttttgtgtagtggtttgggggatatttagtttttttgttttgttttttttttttttggttgaggtttttttgttgtggattgggttatttttgggtttggggtggtgtggtgattagtggttgtgtggttggtattgtttgggttggttggggttgttttttatgtatgttgattagtagttttaggtttgatgttttgtattttgagttatggttggttagttgttgttatggttttgttagttgttggtgttgttttttttggtgaatttggattttattttattgaagtttttttggttgtttagagttatttaatgtttatttggtttgattttttagttgtttttgtttgtagataaaaaattaatttgtagatttaagttttagtgttttttgtaaaattttttgtaatttgtatttgttgtgttttatttgtgggggaggagatttagaatatgagtttgaggaaatttgagaaaggaaagtataaaaaatgtaggtaattaaagatgggagagtttgtatatgtattgattttgtttgtttttttttttttttattttttattttttgttgtttttttatttttttaatttttttatttttagttttttttagaaggaaattatttgatagggtgtatggtagttaggttaggaatatggatttattataaagattttagttaagtagtgagttaaatattataggatattttatttgtaattttattgtattattagagttttgttataaagtaattgatgtttttattttttagatgaggaagttaaaaattagagtttttgatattgttgttttgaagtaattgttattagaatagttgtgaaatatttggttttttgaaatatttggtttttggggtagttggatatttggtgaaagagatattaattgtaataaattgggttgataaaatttttttttttttatttttaaaaagtgtttatttgtaaaaggaagtaaatttgtttgtttttattattggaaagattgtgttttaaaaaattaagttttattattttggaataagaggaagaagttatgtaatagggtattgtgttaataaaagttttagtttataaaatattttttttttaaataaaaataagtattttttttaattattttaagaaatatatattg

SEQ ID NO: 238 - DNA, 2403 bp, Artificial Sequence
  chemically treated genomic DNA (Homo sapiens)
tgtgggtgtgggagtagttttgttgggtgtttgtagttgtgggagttaagttttttttttaggtgtaggtataaaagtttatggtttttgaataatgtggggtagaggtttttttaagtaatgtttaattggttgtttttaattaaggaaagagaggtttttagttttatggtaatttaagtagggtagttttaggttaaaggtattttagaataataagattattttaagaaatggaatgttttattggatatttgaataggttttttgttattggaattggtgtgtattgtattttaattagtatttttgtgtggagggaggtgatttagtttaggaaagttaattatagaaagaggtgatttttgaaaggattgttttagtgttattagaatatatgtgattatattaaaagtttaggtggatatttgtagttagtttggatttggataatttaatattgttggtagaattgaagggaataagttattttaattttattttttgtatgtgtagtgttgagtgagttgggggtgggaggatagtggtttgtttattgtttttttttaaaatttgagatttgaaaatatggaggttttatttgtttttttagtttttgattgttaataaaaaaataaattttgttggttatattttttttttattttaaaatagtaattttatggtttgtattaagttttttagaagtttattttatttgttttgggttagggagggaataatgttaggaaaagttattggtgtttttttatttttgttttttttagggtgtaggatgtgtgggttggtgggtttgtgattttggaatgttttttgttatttttttgtgtgaatttgaaaggattgggaggtgttgagagtagagtttagggttggtgtattttgtggtgttgagtgggtggtgtgtttgggtgtttaggttgggggatttgtagttgttttattgtggaggggaaaatatgtagttggagggtgtgtgttgtgtgggttgtgatttgttattttattggttattttggggtttttttaagtttttaggtagggttgtgagagttttttagagttgaagttttggaggttgatttgtgggtttggttgttatgggaatttggttggtttaaagaagttttttttttgggtatttggaattttagtttagtgtggggtattggggaagtggtgttggggggttgggttgggggattttagttggtagttttggagagggtttatttttggggttgttgggtgaggttggtatgatttttggttttaaaaggaaagtttttgttttttgttttggtgtgagaagttaaagatttattttgagagtggagagagaaatgttattggtaatgttttttttggaaagtttgagaggggttttttggatatattatttagtgtttttaaattagagaagtagtttttttttggtgtttgggtttagaagttgttatttatttagtttatggtttgaaattagtatgggaagtgttggggtaaggttttgttggagattagaggtttgtttgttgggaggagtttttgggggatggggattttatttttttgtttgttttggtttttatttgggatgtttttgtaggagtttagaaagatgatttattatatggttttgggatagagtagtgtgtttaattttgagggaattttgtgtgtttttttgaggttttagttttttaaggtattgttgtttgtttttttttttttagattgaaattggggaagagtgtgggtgtttttttgttttgatgagtttgtttttttaaatgtttattttggttgtattagagtatttgggaaattttgaaaggtgtttaggttttatatagtagtgtttttttatttagtttttgtttttgggtttttttaagagagtttttattttatgttttggtttttttttgatgttgggtttttgaggtaggtatggagtttttttgaaagtagttgtttatttgtgtttttttggtgtaaagttagagtttattttgttgggggaaggggaggtagaaaagattatagttgggaaagtgtgttttttgttttgtttttaaaatatgttttaagattgttattgtgattgttaggagagttattaatgtttaggggttataaaggaatttttgaatttttggttttttttaaatttttaggtttttaaaattttagtgggggttttttggggttgggatttaggttggtattgttgggaggattttgtttagtatttttttattaatattttatgaaggtaggtttttgttttttttggagtttttttttttggaatgtttttaaattttggttaatttatttttttgtgagttattttagggttttgtggtttgggaagag

SEQ ID NO: 239 - DNA, 2403 bp, Artificial Sequence
  chemically treated genomic DNA (Homo sapiens)
ttttttttgggttatagagttttaggatggtttataggggagtgagttagttagagtttgggaatattttgagaaaagaggttttagagaaggtaggagtttgtttttgtgaaatattaataaagggatgttaggtgaggtttttttagtggtgttagtttgaattttagttttaagagatttttattagggttttaggaatttgggggtttgggaagggttgagggtttagaaatttttttatagtttttagatgttgatagtttttttaataattgtgatgatagttttgaggtatgttttaggaataaggtgaaaagtgtatttttttaattgtgattttttttattttttttttttttaataaagtaaattttaattttatattaaaggggtatagataggtaattgtttttagagggattttgtgtttattttggggatttgatattgaagaaagattgaggtatgaggtagagatttttttgaaaaaatttaaagatagaggttgagtagggagatgttgttgtgtgaggtttgggtattttttagagttttttagatgttttggtgtagttgaagtaggtgtttggggaggtgaatttattggggtaaagaagtgtttatatttttttttagttttggtttagggaaagaagaatggatggtggtgttttggaaagttagggttttagagaggtgtataaagtttttttaaagttgggtgtgttgttttgttttgggattatgtagtggattgtttttttgggtttttatggaggtgttttaggtgggaattagagtaagtaggagaatggggtttttattttttaggggttttttttgataggtaggtttttagtttttgatgaagttttgttttggtgttttttatgttgattttgaattatgggttgagtgagtggtgatttttgagtttaggtattaaagaaaaattatttttttggtttgggggtattaggtagtgtgtttagaagattttttttgaattttttaaagaaaatgttattaataatatttttttttttgtttttaaaataagtttttggttttttgtgttagaataagaagtagaaattttttttttggagttaagaattgtgttggttttatttagtgattttaagggtaggttttttttggagttgttggttgaggttttttaatttagttttttagtgttatttttttgatgttttatattaaattggaattttaggtgtttggaagaaaggtttttttggattaattgggtttttatagtagttagatttataggttagtttttggggttttagttttaggggatttttatagttttatttagaggtttggggagattttaggatgattgatggggtaatggattataatttgtatggtgtatgttttttagttatgtatttttttttttgtggtagggtgattataggttttttggtttgagtgtttgggtgtgttgtttatttagtattgtagagtgtattagttttgaattttgtttttaatattttttagtttttttaagtttgtgtaaggggatggtaggaagtgttttgggattataggtttgttggtttgtatattttgtattttggaaggggtgaggatggaagagtattggtgattttttttagtattgttttttttttggtttagagtaaatgagataaatttttgaagggtttaatataagttatagggttgttattttggaatgaggagaaaatgtagttagtgggatttgtttttttgttggtaattaagagttgggaaaatgaatgggatttttatatttttagattttagattttaaaagggggtaataaatgaattgttgtttttttatttttaatttatttagtattatgtgtataggggatggggttggggtaatttgttttttttagttttgttagtaatgttgaattgtttaaatttgagttggttgtgggtgtttgtttgggtttttggtgtggttatatgtattttaatagtgttaagataatttttttggaggttatttttttttgtagttgatttttttagattgggttgtttttttttatataagagtattggttgaagtatagtatatattaattttaatgatagagaatttgtttgggtgtttagtgagatattttattttttagaatgattttattattttaaagtatttttagtttgaagttgttttgtttgggttgttatagagttggaagtttttttttttttaattagaagtggttaattagatgttgtttggaaaaatttttgttttgtattgtttaagagttataaatttttatgtttgtatttggggagggggtttgatttttgtggttgtgagtgtttagtggggttatttttgtgtttgtg

SEQ ID NO: 240 - DNA, 2229 bp, Artificial Sequence
  chemically treated genomic DNA (Homo sapiens)
tttttttttggtgttggttggtgtgggttggggttaggtggagaagttgttttttgttaaggtgatagaatgtgttgggggtgggggttggggttagggttggtgtaattagggggttgttgtttttttttggatatagtggaagttttttttgtattattaaatttttgttattttttttgagggatttgtttttaggtagtatgtaagttgttgttttgggtttattttgtatttttttattgggtgaggaaggagtattttgaatggagatgggggtgtttttggtttatatatttgtagagaagaggtgtgttgggttgtatttttggaggttgtggtaattgatattagagaagattttggttgtagttgggaaggtttattggttggaaagaggtgttttttttttttagtaaagggttttgtttggaagggttgttttttatttgtttagtggtattataggatggttggtttttatttgaatttttttggatggtattattatatagttgggtttttgtagtgttggttttttaatttgatgattgttattttggtgaggatttgtgttgatggttggagaattttgtgttgtgggtgtatatggttaggtggtgtttggtaggtgatgtttgggtgtaggatggtgtttttattgttttattttaaattgttgtttgggtttaggttttttggttttttgaataggggtttggggggttaaggatgttgaggttttgggggtaggaagttttttttggttaagtgtttttttttttttttggtatatatttttttatttatttattttgtttatttttggggtgagaggtttattaaggtagggtgtgttttttttatgaattattttaaggtttttgagttgtgggggttttgggtaattatttttttttttttttggttttaggtattttagtttaggggtttgtagagaagtttgaagtttggataaatgtgttggatgttaataattttttatttttggtagtagtaaaggttaatatatttttattttttattttagtttgttattaaaataaagttgtgtgtggttgagggtaggaaggtgttgagattgagaagaagggatgttttggagaaagtgtgtttagttgattttagaaattagagttttttgggattttgttgagattttttgtagggtgttttaatttgtttttttattgtgtgttggtgttgtagtgtgtgtggtttagggtttggtgattttggtttagtttggtggttgtggtgaggtttttggtgtagttgtttggaattttgtattagaattgggattgtgtaaatgttttggttgaagtgttattttatttaagaaatattgttgttaggaataaaatggggtttttggtgttttgaagtattttttgaaatttttttaaaataatttataaaaaatgtttttgttttaatgttttataatgtttaaggaaatatgtaaatggtttgtttttttattgagatggttgttttaattaatagtgtatatatatataataatttttttaatttttttttttagagttaagtattttattatatgtaaattataataaagaaaagattgtgtaagattatgtaagttgattgatttaaaatattgagttttaatttaggttttttgtttttttatttaataatttttgtgtttggattagattggtgaagtaggttatggaaattaataaagtaaaaaattaaaagtatttttttttgttatttttttttttaaaattaaataatagttgtttttttttgagtaggttttagttttaggtttgagtttttttgtgattattttatagttatttatagtagttgttgttgtttttgttgggtttttgtttttgttttttttgggttgttttttgtatataaaatatattttagttttttaattaaatttaaatatgattttggtagaatttatatattttgtggtgtatggattgtgttggtgtaggggaaataaatattttttggtatttaattattgagtttaatttgaaaaattgggattgggtttttaggtggtattttaggggttttaatttggtttgtgtttttttagattttggtgttgagagtgttgtttttgtgggtgggtggatggagaggtaataatttgtttttaataaaaatttgttgttattgaattgaaagtgaaagggaagggagaag

SEQ ID NO: 241 - DNA, 2229 bp, Artificial Sequence
  chemically treated genomic DNA (Homo sapiens)
tttttttttttttttttgtttttgatttggtggtgataggtttttgttgaaagtagattgttatttttttgtttatttatttgtaaaagtagtgtttttagtgttaaggtttggggaggtgtgggttaggttggagtttttggggtgttgtttaggggtttagttttgattttttgaattagatttagtggttaaatattagagggtatttattttttttgtattgatataatttatgtattatgaaatgtgtaaattttgttggggttgtatttgaatttagttagagaattggggtgtgttttgtatataagagatgatttaaagaaggtagaaatgaaaatttgatagaagtagtaatagttgttgtgggtgattgtggggtgattgtaggaaaatttgagtttgggattgaagtttgtttaggaaggggtgattgttgtttaattttggagggagggatggtgaaggaagatgtttttaattttttattttgttaatttttatagtttgttttattagtttggtttaaatataaaagttgttaaatagaaaaatagagggtttggattaaaatttaatattttaagttaattgatttgtatgattttgtataattttttttttattataatttatatatagtgaagtgtttagttttgaggaggaaagttggaagaattgttatgtatgtgtatattgttagttaggatgattattttgataaagaaatagattatttatatgtttttttaaatgttgtaaaatgttaaagtaaaaatattttttgtaagttgttttaagaaaattttagaagatattttggagtattggggattttattttgtttttgatagtagtgttttttgaatagggtgatattttagttagggtatttgtgtggttttgattttaatgtgaagttttaagtggttgtgttaggaattttgttgtgattgttgggttaagttggagttattaagttttgagttgtatgtgttgtgatgttggtatgtagtaggaaaatagattaaaatgttttatagaaaattttggtgaagttttggaggattttggtttttaagattagttgggtgtattttttttgggatgttttttttttttggttttagtgtttttttgtttttagttgtgtgtagttttgttttggtggtaaattgaaataagaaatggaaatatattggtttttgttgttgttagggatgagaggttgttgatgtttggtgtgtttgtttgggttttgggtttttttgtagatttttggattggggtgtttgaggttaggagaggagggggatagttgtttggagtttttgtggtttagaggttttgggatgatttatggggggggtgtgttttgttttggtgagttttttgttttgagggtaggtgaggtgggtgggtaggggagtgtatgttggagagaagagagaatgtttaattagagagaattttttgtttttggagttttagtgtttttagttttttaaatttttgtttaggaagttgaaggatttaggtttaggtaatggtttggggtggggtggtaagagtgttgttttgtatttggatgttgtttgttaggtgttatttggttatgtgtgtttgtagtgtagggttttttggttattagtataggtttttattgaggtgatagttattggattgggaaattaatattgtgaggatttggttatgtgatgatattgtttgggggaatttgagtggaagttgattgttttgtggtgttattagataggtgagaagtagtttttttaaatagggttttttgttggaaggaggaggtatttttttttagttagtgagtttttttagttgtaattggggttttttttaatattagttattgtggtttttagaggtgtagtttggtatattttttttttgtagatgtataaattggggatatttttatttttatttaagatgttttttttttatttagtagaggggtgtggagtaaatttgggataataatttgtgtgttgtttggaagtaggttttttagaaaggatgataaaaatttggtgatgtggaagaagtttttattgtgtttaggaaagggtagtggttttttagttgtattggttttggttttggtttttatttttagtatgttttgttattttaataaagagtggtttttttatttgattttaatttgtattagttagtgttgaggaaaga

SEQ ID NO: 242 - DNA, 2354 bp, Artificial Sequence
  chemically treated genomic DNA (Homo sapiens)
tataatttttggagttgttatttttggtttattattattgattgttttgggtttgatggagttagttttgtaatatttgtttagaattttatttatatatttgttggatatttgtataggggaagtggatagaaaattatattattaataattttaagataaaaataaaattgtttaagtatgtattaaataatgataagtttatgttttgattgtttagtatttggatttttgtatttgtatgggtttataatataaaaatatatttttaatggtatgagaatttattgtagagagtttttttttttaaaattatatttgtagttttaaaaattataaatatgatgatatttttaaataatttgaattaaaaaatgaatttaaaagttttttttaaaaaaaaaattttttttaaatattgtttgaagatgtattaaaatgaagtagataaatttatttttgtgttgattttgtttaaagtggtgttatgttttaaagaataaaggtaaaaaataaattgatttttttatttttttttttttaaaaaatatttaattgagtaaatgtgagttagggaggagtaaatagtatttgttttttaaaattaatatatattatttataaatatgaagaataaataaatattttaaaagttgaggtaagtatgggttggggagagtagaatgaaattatgttggtttatataatttagtttattatggtttataaattgtttttataatgaatgtttttattaaataaaaagagaaagatttttttaaaaaaatttgtatataatatttttttgaagtagatgagttattttatgtaattgatttaggttgaaagagatagggaaggatggtggaaggagaggggaaagtgggaaggtaggggagtgggtggggggattggggattggggtgggtgagggtgggggggtttataattagtattgtttatagtaagaaatgaagagagggtgttgagagtggagggttgtgggggtggtgagtggggtggtgttgggaggattatttgtagaatttgggaaatgttgtatggttgggttttgttgtgagttagttttataattttttgttgggtggagtttggtagtggttgtttgttgataaagatattattgagttgatttattttgttgtgatttgaggaaagggagaggagaggaaaggggaaaagaagagaagagagtagagtgaagaggaagaagagggagaagaaggaagaggaagatgagggagaataagaatagaaaggagaggaggaaggggaagaggaagaaggagaggaggaggagataattataatgtatttttatttttttgttaatttgtgttaattttggtggttagttttttgttattgattaaataaaggataataggattattagttatgttagatattgggtagtttagtttaagtaattgtgtttttgtttattgtattgtagtagtaatatagagttagatatatgttaaggaataagtatatatggattttattatagttataattttagtagtgtttttagtttattgtttttttttataaatattgtagttagtttttgaatttataaagtgttaagaattggttttataaattttttaaagattttttttgagtgttattgtaaattatgggttttatagattttatattgaatttttaaggtttttgtagtgttgggatagtgatagtaaattttatagtttttgagtgtttttttagatgttaaaatttagaaatgtttttattattgtttaaattggttaaggtttggtataagtattgagttgggttttgtttggttagaatagaagaaggaagaggagagaataattagagtagttagtatgtggttggtgaattttagtttaggtttttgtatttttagtgtagatgtgagagttagagtttgggtttggttttagttatagataagtttggttattgtaagtaaggtttagagttgggagttggtttgtattagttattgtttgttttatttttgttgttgaattttgttttttttttagttaaggatagatattattaaaaagaaaaaatagaaaagaaaaatattatattatagtgttttttattttttttttatttttgtattttataattttatttttgtggtttaattttagagaatagggagagggagttagtttttttttgtagtttttttttttaaaaattatagatatataaagttaattgttaatttttatttttttaaaaatttttaatttgtagttttgatttagatagtagtttttttaggaaaagatgtggttttttgtttagttttttttttt

SEQ ID NO: 243 - DNA, 2354 bp, Artificial Sequence
  chemically treated genomic DNA (Homo sapiens)
ggagaggagagttgaatagggagttatgtttttttttgggagggttgttatttaagttggggttgtaggttggagatttttaaggaagtggaaattggtaattggttttgtgtgtttgtggtttttggggagggggattataaagaggggttaattttttttttttattttttaaggttggattatagggatgaggttgtgagatataaagataaaggagggatggggaatattatgatgtggtattttttttttttgttttttttttttgataatatttatttttggttaaggggagggtggagtttagtggtggaaataaagtgagtagtggttggtgtgaattgatttttggttttaagttttatttgtggtggttggatttgtttgtggttgaagttgagtttgggttttgatttttatgtttgtattggaggtgtggaaatttggattggggtttattagttatatattggttgttttggttgtttttttttttttttttttttattttaattaaataaaatttaatttgatgtttgtgttaggttttggttagtttggatggtgatggaaatatttttggattttagtgtttaagggagtatttaagggttgtaaggtttgttattattgttttaatattgtagagattttgaaggtttagtgtgggatttgtagaatttatggtttgtggtgatatttagaggggatttttgggagatttatagagttggtttttagtgttttgtgggtttagaggttggttgtagtgtttatgaagaggggtagtgggttggggatattgttggggttatggttgtagtgaggtttatgtgtatttgttttttggtatgtgtttgattttgtgttgttgttgtagtatagtgggtaggggtatggttgtttggattgggttgtttgatgtttggtatggttggtggttttgttgttttttatttgattgatagtagggaattgattgttgaggttggtataggttggtagggggatgaggatgtattgtggttgttttttttttttttttttttttttttttttttttttttttttttttttgtttttgtttttttttattttttttttttttttttttttttttttttttttttattttgttttttttttttttttttttttttttttttttttttttttttttaggttatagtggagtgaattagtttggtggtgtttttgttaatgggtggttattgttggattttatttggtagaagattgtagagttagtttatagtggggtttggttgtgtgatattttttgaattttgtaggtgatttttttggtgttgttttatttgttgtttttgtggttttttatttttaatgttttttttttattttttattgtaaatgatgttaattatggatttttttatttttatttattttagtttttagtttttttatttatttttttgtttttttatttttttttttttttttattatttttttttattttttttaatttgggttagttatataagataatttatttgttttagaaaaatattgtgtgtggatttttttaaaaaaatttttttttttttatttggtaaagatatttattgtgggaatagtttatgaattgtaataagttgagttatataaattggtataattttattttgttttttttagtttatgtttattttagtttttgaggtatttgtttattttttatgtttatgaataatatatattgattttaaaaggtaaatgttatttatttttttttaatttatatttatttaattgagtattttttaaagaagaagaagtaaaaaaattagtttattttttatttttgttttttaaaatataatgttattttaagtaaggttagtataaaaataaatttatttattttgttttgatgtatttttaggtagtgtttaagaaaagttttttttttaaaaaaagtttttaaatttgttttttagtttaaattgtttgaaagtattattatatttgtagtttttagggttataaatgtaattttaagaaaaaaagttttttatagtaagtttttatattattgaaggtatatttttgtgttatagatttatgtagatgtaaaagtttaagtgttggataattaaaatgtaagtttgttattgtttaatgtatatttaaataattttatttttgttttgaaattattaataatgtggttttttgtttattttttttatgtaggtgtttaatggatgtgtgagtaaaattttgggtaggtattatgagattggttttattagatttagggtaattggtggtagtaaattgagagtagtgattttagaagttgta

SEQ ID NO: 244 - DNA, 2738 bp, Artificial Sequence
  chemically treated genomic DNA (Homo sapiens)
tgtattgttgagggttattgattattgagaattaggtttagtttttagaggaagtgttagaggagggggagggtgggtgagggttttggggtggtgggggtgttggttttagtatgtggaggtgataggatttgtaagattttatgtgttgttggggtaggattgtatagggttgttatttatttatttggggtgtttttaatgggtatttgtgtattttagtttgtgtggtgagtgtatgtatgttgttgttgttgtgtttatatggttttttaaagttgggggaggggttgtggagtgaaggagttgtaggtagattttttttttttttttgagttgggaaaagggttagttttgtgttttgtatgtttggttttgttttgtagtttgttggtgagttaagagttggtagagtagaggaggtgtatggtttgggttgtgttattattttttggtttgttgatttggttaggagttggggatggtggtagtattgtggaggtatgttttgtgttgtttttatgtttttttttgaaagtagtgtttttagggggaaagtttgtaatgttatttgttttgttggtaaagttttgggatgttgggtattttttgaggagggggaagatgtggtatttttattgaggttggtaggttaggaagagaagttttttgggtgtagggtgtagtttagttttggggattttttgggttttttgtgtgttggttgggatgaagtgtgttttgtattggatttgggatttgggggtgggggttggtgttggtagtgttagatgttgttttatttttttttgattttggggaggatagtaataagttttgttttagttattttattattttgttagtatgtgtagattttgggtttttggagtttggtgtggattttgttttgttttgtgtttttttttgtatgttttgtgttattttaagagtttgtgtggttttgggtgggtgtttggtttttggtgaaatgtttggggtgtgttgtgtgggtgtatggtgtttttttttagtagtttttggttgtgggggtatatgtatttatttgtattttgtagggataggtggtttttttgttgggagtttttgttttggggatttttgggtgggttggtggtgttggttttttgtgttgggttaaaggtggttaatattaaagttagggttatgaattggtttagttgtttggtatatatggtttttggtattaattttttgttgggagatttggattttttgtgtttttttttttttttttttttttttttttttttgttgtttttttttttttttttattttttttttttgtttgtttttttttttttttttgtggttgtggtttggatagaggttatttagtgtttttttgtagttttttggagagtatgtgattaggttgttagtagtgttgtgagtgtttggtaatggtagggatggtgttttaaatatttttggaagttttggtgttatttgaatgaaggagttgagtaggtgttgttttggtggttggattaatttgagattttggtttttttgataatatggttgggaggtggggtttgtgtttaattattataggaggaagttgagtgttgttgggagtgttggataaagttgttgatttggtggtggttatgtgtttgtgtgtgtgtgtatgagtgtgtgtgagtgtggttggagatgtgtgtgtgtgtgtgggtgttttagggtaatggttgaaaggattgtataatataagagtgaatttaagttttagttgttgttaaagggggatggtgtgttttgggatagtgtttttggggtttttggtttgtgttatatttatattgggttgggaaagttttttttttttgttgtttggaatttagtgagatttttagtttagaggatttgataaattgaagtagttttttaggtataatgatgttgtgggttaattgagtatatatgggaatttttggttttgtgatattttgtattaaaaagaattttatgattgaagataggagtagaagtattagatatagtatttggtttgagtaattgttttatttttttgttttggtgggttgtgtaatatttggagtgttgttttttgttttttttttaatttagatgtattttaggttgggttgtagggatttaggtgatagttaggatttgtattatttttaggagggtggtagggaggtttaaggtagttttgagttagtttgttgtggagtattgtgtgtttggaggttagagtttgaaaggtaattttatgtgtttttaaatatatttttgtatttttttaaagtgttgtttgttattttgttttgggtttttttttattttttagttatttgatggaagtggtgagaataaaaataaagataaaaaagttaaatttggggaagttatttttattttttttttttttttgtttggttttttttttaagaattgttgggttgggatagtttttggttatttttttatttggtttgtggagggaaggagaaagttgggtgttgtttggagtgtttttttttttgttgtgtgtgtatgtgtgtatgtttatgttttttttgtgttggggttggggataggaattgtttttggttttgttattttatggtgtagtttggggggtttgtagggttgggggagggtggggatatgagtgttgtgtttaagtgttttagggtatgtatttggtgttggtgtgtatttg

SEQ ID NO: 245 - DNA, 2738 bp, Artificial Sequence
  chemically treated genomic DNA (Homo sapiens)
tgagtgtgtgttaatgttgggtgtgtgttttggggtgtttgggtgtggtgtttgtgtttttgtttttttttagttttgtgagttttttgagttgtgttgtggggtgatgggattgagagtagtttttgtttttggttttggtgtgggggagatgtgagtgtgtatatgtatatatatagtaggggaagaggtgttttaagtggtgtttaattttttttttttttttatgggttgggtgagaaagtagttgggggttattttgatttggtggtttttggggagggggttgaataagaaaagggaggagatggagataatttttttggatttagtttttttgtttttgtttttgtttttattatttttattggatgattggagagtaaaagggaatttggagtggggtggtgagtagtgttttgagaaaatgtaggagtgtgtttggagatgtgtaaagttgttttttaagttttggtttttgggtatgtgatgttttgtggtgggttgatttagggttgttttgggtttttttgttatttttttggaaatgatgtaagttttgattgttatttggatttttgtagtttagtttggaatgtgtttggattaggggaaagatgagaaatgatattttaggtgttgtatggtttattaaagtgggaagatagggtagttgtttagattaaatattgtatttagtgtttttgtttttatttttaattgtggggttttttttaatgtaaagtgttataaggttaggaatttttatgtgtgtttagttggtttatagtattattgtgtttaggaaattgttttaatttattaagttttttgggttgggaattttattgaattttaaatggtggaaagaggaaatttttttaatttgatgtgggtgtgatgtgagttaggggttttagggatattgttttagagtatattgtttttttttaatagtaattggagtttggatttgtttttatattgtatagtttttttgattattgttttggagtatttgtatatgtgtatgtatttttggttgtgtttatatatatttatatatatgtatgtaaatgtgtggttgttgttaggttggtaattttgtttggtgtttttagtggtgtttggtttttttttgtagtagttgagtgtaggttttgttttttggttgtgttgttaaaagggttggggttttggattggtttagttgttgggataatatttgtttgatttttttatttaagtgatattagagtttttagggatatttgaggtattatttttgttattgttgggtatttgtggtgttgttaatggtttggttatatgttttttggagagttatgggagggtgttgggtaatttttatttgagttgtggttgtgaggaggagggaaaaggtgagtaaaaaggaagagtgggaggaggaggggaagtggtgaaggaggaagaggaggaggaggaagaggggagtataaaggatttaggttttttgatgggaggttaatattaagaattatgtgtgttgagtggttgggttagtttatgattttggttttggtgttggttatttttgatttggtgtgggggattgatgttattaatttatttgagggtttttaagataggagtttttagtagaaaggttgtttgtttttgtagaatataggtaagtgtatgtgtttttgtagttgggagttattgggagaggatattgtgtatttatgtggtgtgttttaggtgttttgttgggagttaggtgtttatttagggttatgtaaatttttgggatggtatgggatgtgtaaagggaagtgtgaggtaaggtgaggtttgtgttgggttttgagggtttggaatttgtatgtgttagtagggtgatgaaatggttggggtaggatttgttgttgttttttttagggttgaggggaaatgaagtagtgtttgatgttgttagtgttagtttttgtttttgaattttgggtttggtgtaaagtgtgttttattttggttggtatgtgggaggtttagagggtttttggagttgggttgtgttttgtgtttggagaatttttttttttggtttgttggttttagtaagggtgttgtgttttttttttttttaaaagatgtttgatattttagaattttgttggtgagataaatggtattgtgaattttttttttgggggtattgtttttggaagggagtgtgagggtagtgtaaagtgtatttttgtggtgttgttgttatttttagtttttggttaggttagtaagttaagaaatggtgatatgatttgaattgtgtgttttttttgttttattggtttttggtttattggtaagttgtaaagtagagttaggtgtgtagggtatggggttggttttttttttagtttggaaagagaaagaaaatttgtttatagtttttttgttttatgattttttttttgattttggggggttgtgtgaatgtggtagtggtggtgtgtgtgtgtttattgtatgagttggaatgtatgagtgtttattagggatgttttaagtgagtgaatggtggttttgtgtggttttgttttggtggtgtgtggggttttatggattttgttgtttttatatgttggggttggtatttttattattttgagatttttgtttatttttttttttttttggtgttttttttgagaattgaatttgatttttggtggttggtgatttttaataatata

SEQ ID NO: 246 - DNA, 4102 bp, Artificial Sequence
  chemically treated genomic DNA (Homo sapiens)
gtgttgttatttattttgtttttttttgtgtatagttaatggagagatttagttgaaattgtgaagtttttttgtattgggtttttttgtttggtgattgatgttttagagttaatagtgagtgagtagttggagtggggaagtagaagttagagaggggaagaatatggtgttttttttttttttttttttttttttttattttagtttttttgtgtattttgtttttaagtttttgtgtagttaggagttgttgttgttttttagtttttgttagttgttttttgagttgagtgtagtgagtgttgttgtttgggttttttggtggggttagggttagtatggagtatttgggtttgtattatttttatttgggttatgtagagtttattagttttggtattgattagatttttaatagtttggattagggtggttgtatgggatttgttttgtgtttttaggatggagaatatggttttggttgtttggttggaggtgtttatatttatggtggtgggggttttgtggttgtgatgggggttggaggagtgggggtttatggtattggaggttttggtggttttggaggtttggtaggtggtggtggtgtttgtagtatgggttttttgattggtttttataatgtgaatatggttttggtaggtggttttggttttggtggtggtggtggtagtagtggtggtgttggggtatttagtgttgtgggggtaatttgggtgttggtatataggttgtttgttggagttgtggtttatttttagtttttggttattggtttgtttattgtgttttttgtgtttgttatgttgggtgttaataattttattggttttatttttttttggatggagagtaattgtagatatataaaggataggtttataggtgagtttggtttgtgtgttttttgtttggttgtggtttgggttttgtgttatttttgttttgttgggtggttttttaaagttggttttgtgttttaggttgtttagttttttttggtgttttttttaagttgagttgtttgtttgattttataatgtagatttgttatgtttgaagagtttttttagtttggatttttttttgttttttgaaggatttttgtttggaggagttttttttggttttttttttggatttattagttgggttaggtagagagaaggaggttatagatttaggattattttttgtagttatttttggtttgggaattttagagaaaggggtgtaatgtgaatagttttttttgttttggttgttgttttaggatttaggaagtgagttttaggattagatataagaaaagaataggtttttttatttttagttttttatatatatgtattttgtgtttttagttttggtgtttgtggtgttgtggggttagtgggggttttgagttttggtaaattagtagaattagtggtttttttttttttttttggagagtaggttttatttgggaggatggtagtggggtttagttgtttaggatagttagttttttatttttgtttttttttggttgggtgttttattttgggtttagttttgttattttgggtatgaataatgtattggtaggttggtgattggtggtgggaagattatttttgggatattgggtattaagtggtggttgttgttgttttttttgttgtttgtttttgtttttttttgttggttttggttttttttgtttttgtttttattttgggtatttaattttttttttggtgtggatttttttttttgtttttattttttgttttttttagggttttttggattttagattatgatttttttgtttgggttgggaagtagttataaattgagtttaggttagttagttgattttagagagaggaggtaggaggtattggttgttgttggtagagatggggttttttgggggttttttggtttaagggtttaatagtggaaggggggtttatataattatttgggagaagttgttgagagttagatattgggttaggagattttaaagtatttttggttttttgtttttgttttaggtagtagtatagttagggaaattgtttttgtagttttttattagattttggggttatggtagaagtggtgtggaggttggtgtttagaggaagaatagttgtttgggtttaggttttaggaagggttttttttagaggggttttagtgtttttaatttaagttttttttggtttggggtagtagggtttggtgtttattttattttttatttaggttaggttagttttgaagggttttgttggaaatttagttgggagtttattaattttgggtttttggtgaaaggtatttggtttagggtttattgtggggttttaatattgtgttaggtatgaaggtggttttagtgagtgtatggttgtggttttgttttgttttgtgttttgtgtgtttgttttgtgtttgtgtttgtttggttttgtttgggtgtatagatttgtgagtttgtttttgttgtatgttgtgttggtgtgtgttgttgtggatggaggtttaggttgggttttagagttaggtttggttttttattttgagtttgaaggtttggggttgattgaggggaggggagtgtgattattagtttgttttagattgtttttggaggagaggtggtagggaggtggttgggtttgtgggagtttggggttagggaggtttttgtggtagtggtgatggtggtgttggattggtgggtaggaggaggttgttttttgttgtgggtttgttgttgagggttaatgggaggattttggttttgtttgtgggggtttagttgttgtgtttgttgatttgtggggtgttgggtttgggatgttttttgatgttttgttgtttgtttttgttgtttgtttgttttttgttttagtggtttttttattttttattgtaatatgttgtataggttatttttattagaattggatgttttttaagaagaagaagttgtgtatgttttttatatgtttgtagatttgtgagttggagaagtgtttttattgttagaagtatttggttttggttgagtgtgttgttttggttaaggtgtttaaaatgattgatgtgtaggttaaaatttggttttagaattggtggataaagtggaggtgagtaagtggggtgggttggttgtttgtgagtggtgtggttttaggtagtttttggtttattggttttttgtggggtgtatatattttttttgtttgtggtttttgatttttttggaggagtgagtttttgttaggtttgtggggagttggaagtaattgaggttgatagttgggatggggttgaagagttttggttttgttttattggaggttttagggttttttggttggtatattttttgttggtgtagatgtggtaggtttattttgttgtttgggtaaataggtgggttagtgtattttatgtagtttaggttttagggatttgtgagttttggggagttttttgtttgtgtaaatttttgtttatggaattttgttttgttttggagattggatgtagaatagtttgtattttgttgtagtgttttagttgggtttttggtagagggtttgtggttttagattgtggttttgttgatggtttttttttttagatatttggtttttgtgtagttggtttttattttggaaggagaaaattaatttgtgttggttgtggtggggttttgtgggttttattggaaggggaattaattaggagtagatgggtgtgtgtgagaaagagaatttttttttttttatagttataattttagttattatgtaatgggttttttgttttgttttgtttttttatatttatgtttatggatgtgaagtgtttttaatatttttgagtagtttttttttttgtgtgtattgatgttttttttggttgtattttttggtatgttgtattttttggtatgttgtatttttttgtatatttggtttttgtttgttggagttttttttttagtttaggttttatggggtagtgtgggagagtttgggtgaagttggtggtgttgagatgggtg

SEQ ID NO: 247 - DNA, 4102 bp, Artificial Sequence
  chemically treated genomic DNA (Homo sapiens)
tgtttgttttggtgttgttgattttgtttagatttttttgtgttattttatggggtttgagttaggggagaaattttggtgggtaagggttagatgtgtgggagggtgtagtgtgttagagggtgtagtgtgttagagggtgtagttggagaaagtgttagtgtgtgtggagagggaggttgtttgagagtgttggggatgttttatgtttgtgagtgtaaatgtgaaaaaataaaataaaataaaaagtttattgtgtagtaattagagttgtggttatgggagaaggaaaatttttttttttatatatatttatttgtttttaattgattttttttttagtgggatttgtgaaattttgttgtagttggtgtggattgattttttttttttagggtagggattggttgtgtaaaggttgggtgtttgggggaggagattgttagtagggttgtggtttggggttatagattttttgttgggagtttggttggagtgttgtaataaggtgtgggttgttttgtatttagtttttaggatagagtaggattttataagtaagagtttgtgtaaataaaaagttttttaggatttatagatttttggagtttggattgtgtggagtgtattaatttgtttgtttgtttaagtggtggaatagatttgttgtgtttatattggtagagagtgtgttaattagaaagttttgaagtttttggtaaaatagagttagggttttttagttttattttagttattggttttggttgtttttagttttttgtaagtttagtgggagtttgtttttttgaaaggattagaaattgtgagtggaaaaagtatgtgtgttttatgagaggttaatgaattgagagttgtttgagattgtgttgtttgtgggtggttggtttgttttgtttgtttatttttattttgtttgttggttttggaattaggttttgatttgtgtattggttattttgagtgttttggttagggtggtgtgtttggttgaggttaggtatttttggtggtggaagtgtttttttagtttgtagatttgtaggtgtgtgaaggatgtgtgtggttttttttttttggggggtgtttggttttgataggggtgatttatatggtgtgttatagtgaagggtgagagggttattggagtgggagatagatagatggtagaggtaagtagtagagtgttaggaagtgttttaggtttaatattttgtgagttagtgagtgtagtagttgaatttttatgagtagggttgagatttttttgttagtttttagtgataagtttatggtgggaaatggtttttttttgtttgttagtttgatgttgttgttgttgttattatggaggtttttttggttttgggtttttgtgagtttaattatttttttgttgttttttttttaggggtagtttaaggtgagttaatggttatgtttttttttttttagttagttttaggtttttaggtttagagtaagaggttgagtttgattttggaatttgatttgagtttttatttatagtagtatatattaatataatgtataatgggggtaaatttatagatttatatatttaaataggattagataagtataggtatgggataagtatataggatatagagtaaaataaggttatagttatatatttgttgaaattgtttttatgtttgatatagtattagggttttgtggtaggttttaaattgagtattttttattagaggtttaggattagtggatttttggttgggtttttagtagggttttttaagattggtttggtttgggtggggaatgggatgggtattaggttttgttgttttaggttagagaaaatttaggttgggggtattgggatttttttagggagggttttttttgaggtttagatttaagtaattgttttttttttggatattagtttttatattatttttgttgtggttttagagtttggtaagaagttgtagaagtagtttttttggttgtgttgttgtttggaatagaagtaggaagttaggggtgttttggaattttttggtttagtatttagtttttagtagttttttttaagtagttatgtaaattttttttttattgttgggtttttgaattgggggatttttaggaggttttatttttgttagtagtagttagtgttttttgttttttttttttaagattggttggttaatttgggtttaatttgtggttgttttttagtttggatggaaggattgtggtttaggatttagggaattttaaggggagtagaaagtgagaatgggggaagggatttatgttagagggagagttgagtgtttagagtggaaatgggagtagagggagttagggttagtagaggaaggtgggagtgggtagtagagaaggtggtagtggttattatttagtatttaatgttttgggagtagtttttttgttattgattattagtttattggtgtattgtttgtgtttaagataatagggttgggtttggggtaggatatttagttgggagagaatgaaaatgaaaagttagttgttttgggtggttaagttttgttgttatttttttagatgaagtttgttttttggaaaaaaaaaaaaaggttattggttttgttgatttattggggtttagagtttttattggttttgtagtattatgggtattggagttaggggtgtgaagtgtatgtgtgtaggggattggaggtgggggaatttgttttttttttgtgtttgattttggggtttgttttttgggttttagaatagtagttaggatggaagaaattgtttatgttgtatttttttttttaagatttttaggttaagagtagttgtagaaggtggttttgaatttatggtttttttttttttgtttgatttggttagtggatttggagaggggattagggagagtttttttgagtaggggttttttgggagatagagaggggtttaggttgagagaattttttaagtatggtgagtttgtgttatagaattgggtgggtggtttaatttgggggaagtattaagaagagttgggtgatttggagtgtagaattggttttggggagttatttggtggggtaggggtagtatggagtttgggttgtggttaggtggggagtgtgtgggttggatttatttgtgaatttgttttttgtgtatttgtggttattttttatttaggggaaggtgaggttagtgaggttgttgatgtttggtatggtaggtatagagggtatggtgggtaagttggtggttaggggttgggggtgggttatggttttggtgagtggtttgtgtgttggtatttggattatttttgtagtgttgagtgttttggtattgttgttgttgttgttgttgttgttaggattggggttgtttgttaaggttatgtttatgttgtaggagttggttagaggatttatgttgtaggtgttgttgttgtttgttgggtttttggggttgttgggatttttagtattataggtttttgtttttttagtttttgttgtggttgtggagtttttgttgttgtaagtgtaggtgtttttgattaagtagttaaggttgtattttttgttttggaggtgtgaggtgggttttatgtagttattttggtttgggttgttgaggatttggttgatgttgaagttaatgggttttgtgtgatttgggtggaggtggtgtggatttaggtgttttatgttggttttggttttattggggggtttgggtggtggtgtttgttgtgtttggtttggggggtagttagtaggggttgggaggtaatagtggtttttggttgtgtggagatttggaagtgaagtgtgtagaaaggttaaagtagaagggggaggggagggagagagggggtgttgtattttttttttttttggtttttgtttttttgttttggttgtttgtttgttgttgattttgggatattaattattaggtgaaaaagtttggtgtaagagagttttgtggttttgattgggtttttttattggttgtgtgtggagaggagtggggtgaatgatagtgt

SEQ ID NO: 248 - DNA, 2337 bp, Artificial Sequence
  chemically treated genomic DNA (Homo sapiens)
ggatgatattaaaagttttattatttggttttttgttttggggtttttaaggagtaagggaaagttgtggtttttggtttgtgtttggttggtggttttatatttttttatttgaggttgattttttatttgaggttgatttgttatttgaggtgggaaggggtatttggagtttttagttgtagggtgagagatatttagtggttttattttttagtttttagagttataggttaggagtggagggttaaggttggtgaaaaaatttggttatgtggatgggttaaagattaggggttgttgtgaaggtgaggatagaaaagtgttgtagaggtttttagattatggttttgtttttgttagagagttttaggggttttagtggtttttttagtgttgtgtatatatgaggaaaggttagagaatgagagggatatagtatttttttattttttaagtttgtatggggagaagtggttgtgagttttagtattagggaaatgtagtgttggggtttgggtaggattgattgttttagtttttattttagttgtaattttttagttgaatagggtttgttttggtgggttagggtttttgtttttgttgaagaattttggtttaggaaagatggagaggttgggggttgaggagagaggaaaaaatggtaggggaggattggaggtgattgagtgttgagtttttatatttttattattgttgttgttgttgttattattattattattattattattattattattattattattgaagtattttatgtttagagttaagataagattataaatataatatatagaaaattaataaaatagaattttgtttttttttgaggtttttttttttatttttaggtagtatgtgttttttttagtggttttggggagggggtgggagagatgataggtttgggattagggagtttttaaggtttttgttgaggggatagtgaatttattattgaattgtgtatgggggatatggataaaatgagatgtgatagggataagagtattttgttttgtttttaggaaatattaagtgagtttgttttttagtttttattaggaagtttgattaggttgaggtgagttttttgggaaggaagggtgtgtgggatgttgggtgggtttgagtagtgaggttttagagtatttgttgggagttgtgtgggtgggggtgtttaggagagtgttgggttttgtttgtttgtgttggagagtaggttttttggtttttttatttgagagtttttttttttgggtttttttgatgtttgtggttttttataggtttttttttttgtgttttttttttttttttagtatttttatttggtttgttttttttttttttttttggtattgagttgagatgtgttgagtagtttgtttttttttttttattttatgtgttggttttggaattatattttgatttgtttttttgttaggtatagggtgtgtgtgattttgatgtgttgttgttgtgttaggtagtgattgtagtgaaattttttttttagttttagtgtttggtaatgtgtgtatgtttggtggttttgttggttgttgggtttaaaggaggaatttgttatgtagagtggagatgttgaggtttgtggttattgggtttaggatttttttttttagttgatttttgaatatagattttagttagtattgggatgttttttattttgttggttttttttttttgttttgtatttttttagtgttttttttagatttttttttagttttttaggtttgtgttgtttgtttagattttagatgggggaggggaggagtagtttgaatttttatttgagtttggggggaggggttggttaggtgtgtttttttttagttgtattttgtttttttttttttttttatttattttgtttttattttttgttatttttttaatttaatgataaatttaggttgttaatttgtaatgatgtagattgatttatagtttatattaatggttttttatttttgagtttggttaatggatattagttgggatttaaggttaataaataatttaatttgagattttgtgtttgttttttttttttttgttttgtttgtttttttttttttttttttttttatttttttttttttttttgattattattttttttttggtgttttattttgttttagttttttatttatagggaaatatagttttagatagatttaattttttttttttagtgttattttttatttttttgtatgatgtattttgtttttaatggagttgtttttggttggggaattttattagggt

SEQ ID NO: 249 - DNA, 2337 bp, Artificial Sequence
  chemically treated genomic DNA (Homo sapiens)
gttttggtagggttttttaattaaagatggttttattaaaaatggagtgtgttatgtaagggggtagggggtgatgttgaagaggaagagttgagtttgtttgggattgtgtttttttgtgggtggggagttggggtaagatgaggtattaggaaaggggtggtagttagaggagggaggaggaataaggggaaggaagagagagggagtaggtggagtgagagagggagaaataggtgtggggttttaggttggattatttgttggttttaagttttaattgatgtttattagttggatttgaaagtgaggagttgttaatgtggattatggattgatttatgttattatggattaatggtttggatttattattgggttggggggatgatggggggtgggaataagatggatggaaagggagggaaagataagatgtaattaggaagagatatatttgattagtttttttttttaggtttaggtgggagtttaaattgtttttttttttttttatttagagtttagatagatggtataggtttaggagattaggagggaatttggagggggtgttggaggagtgtgaaatgggggaagggagttggtagaatagagggtattttggtattggttggagtttgtgtttgagggttgattaggggagggggttttgggtttggtgattgtaggttttagtatttttattttgtgtaataggttttttttttgggtttagtggttggtgaggttgttagatatatatatgttattagatgttggagttggagaaggagttttattataattgttatttgatgtggtggtggtgtattgagattgtgtatgttttgtgtttgatggagaggtagattaagatatggttttagaattgatgtatgaagtggaaaaaggagagtaaattgtttagtgtgttttagtttagtgttgaggaggaggaagaaaaataggttgagtgaaggtgttggaaagggagggaggatgtgaggggaaaggtttgtggggagttatgggtgttagagagatttgggaaggaaggtttttgggtgggggagttaggagatttgttttttggtgtagataggtggggtttagtgtttttttggatgtttttgtttgtatagtttttggtgggtgttttgaggttttattatttgagtttatttagtattttgtgtgttttttttttttgaggaatttgttttagtttgattaggttttttggtgagaattgaggagtggatttatttgatgttttttggaagtagagtaaaatgtttttgtttttgttgtgttttattttgtttatgttttttgtgtatggtttaatggtagatttgttgtttttttagtgggggttttgaagattttttgattttagatttgttgttttttttattttttttttaaagttattggaaggagtatatattatttagaagtaagaagaggagttttagaagaaaataaagttttattttattaattttttatgtgttgtgtttgtagttttgttttagttttggatgtgaaatattttgatgatgatgatgatgatgatgatgataataataataataataataataataataataataataaagatgtgaaaatttgatgtttggttatttttaatttttttttgttatttttttttttttttttaatttttagtttttttattttttttgagttagaattttttagtaaaggtgagagttttggtttgttgaagtgagttttgtttgattgggaagttatagttgagataaaggttggagtgattagttttgtttaggttttagtgttgtgtttttttggtgttgaggtttatagttgtttttttttgtgtagatttgggggatggagaggtgttgtgttttttttattttttagtttttttttgtgtatatatagtattaagggagttattgaggtttttaaagttttttggtggagatggagttatagtttgggggtttttgtagtgtttttttgtttttatttttgtagtgatttttggtttttggtttgtttatatggttaggtttttttgttagttttggttttttgtttttggtttgtggttttggagattgaaaaatggggttattgggtattttttattttgtagttgaaggttttaggtgtttttttttattttaagtagtagattagttttaagtaggagattagttttaagtaggggaatgtaaagttattagttaggtataggttgaaggttataatttttttttgttttttggagattttagggtaggaggttaggtgatggggtttttagtgttattt

SEQ ID NO: 250 - DNA, 2351 bp, Artificial Sequence
  chemically treated genomic DNA (Homo sapiens)
tagttgggatgtattgttgttttttttgttattttagtagttgtttagagatgagatttagttttattgtgtttttttgggatttataagaatttttttttgggttgagggggtgttgttgtgggtgtattttatggagagttttaaggagttagggaggagttttttggtggtttgggttttggattggtgggtgttgggtgggtttttatggttgtttttggggttgttaggtttgtaaggtagataggtttttggatttgagtgtggttgtggatgagggtagtgttgttattagaggtgatgtttagggttattttttttgatttgtttttttttttttttgatttgttttttttttttgatgggtttgtttttgagtttgatatttgtttgggggtttttggtgaaggttgttggtttttagaatgtattatttttttttggtatgatgggaattatttgtgatattgttattattttgttgtaatttgggtagtagttgttatgattttattatgtgttttttgtgaggtttttatttgttattgagtggtagggatgtgtttttatatttttatgtgttattttgtaggtgttttttgttgatttttgtgtgttttggggtttgtttttttggtaggggttgattttgtttgtgatttagatagtttggagggttaggattgaggggagggggtggtggagtgaaggggagggtgggtgttgttggtaagaattataggtaaagagggtgttgggggtagggaaggtttggaggtttgaggagtagaaagtagatttttgattttttttgggttggtgagttggggtttagtttagagtgatagggattaaatttgggtttatgtgttgtgtttagtttggggtttaggttttttttttgtgagttgagtagatagggagggttttgggggaaggttgtgggtttttgggtggaagagttttgggtgaggtttttgaattggtaagtggggtagtggtggtagggggtttagggaagtggggttagttgggggtttttaggggttttttagggatatatttgttgttagggtgtggggagtgggaagtgggggatggggtggattttaggattttgggttgtgtttggttagagtggggaattggatgttttgtttttggtttagttttttttggttgtgattttgggggattattgattttattgtgtgtttggagagtttaatttttatttgttagtgggtgatatagaaggtaggaatgtagaaggttttttagaagtttttattggtttgtaaggtagaggttgttttttgttgaggatatatttgttttttttattttttagattggtggttgtttaaggagtttggtatagttgtatggaggtgtagtatttataggataagtggtggaatgttttggttgtttttggtgtaggtggtgggtggggttggggggttttgtagtttttttggttttggttttttggataggttttattttttttttattgtggtttttttggtaggttgtttgttattttaaagttatgttgttttgggtattttgttttttttggggattggggttggggttggggtagttgtgtttatgggtgtattttttgtgttgggtattgtgttgagtttaatatataggggtttggggaggtttgtgggtgtttaggttgagatgtgaattttgagtttgtgtaatttgagttttagagtggtggtttttgttttttataagatattgttttgtgagggggttagttttgaagttggatggtttggtttttgttattatgtggaggttttttgtaggtgtttgtgtagatgtttttgtgtggggatttgtttggttgatggattagggggaaggttttttttatggtgtgaggtagtattgagggttttgtgtttagtaggtttattgttggtagttgggtttggtttgataattgtggattggggtgataggttttgattttgtagagtaggattgtggaaaatggatattgatgttgtttggtggatttaggtagggttgggatgtttgtaggatttatgggataattagaatgattgggtttgattggtatagggatgtggattatggtgtttgttattagtagatataagttgtatgtagtgggttgtaggtgttttttgggttggaatatatggatgtttaggtgtggaatggtttggatagtagataataagtttttgttgtggttatttttgggtgtgggttgtgggttttaatttttttatttttgtttatttgaattttttaattaaaaatatattgttttttaaaaataataaaagattatt

SEQ ID NO: 251 - DNA, 2351 bp, Artificial Sequence
  chemically treated genomic DNA (Homo sapiens)
aatgattttttattatttttaaaaagtaatatatttttaattagaaaatttagatgagtaaaaatgaaaagattaaaatttatagtttatatttaggggtgattatgatgaaggtttgttatttgttgtttgggttattttatatttggatgtttatgtgttttggtttagggagtgtttgtggtttattgtgtatagtttgtatttgttgatggtaagtattgtagtttatatttttgtgttagttaggtttagttgttttaattgttttgtgggttttgtaaatattttggttttgtttggatttattgggtagtattagtgtttattttttatagttttgttttgtagagttagggtttgttattttggtttatggttattaaattagatttaattgttgatagtgagtttgttgggtatggagtttttggtgttgttttatattgtggggagaattttttttttgatttattagttaaataagtttttgtatgggggtatttatataagtatttatagggagtttttatgtggtagtgggggttgggttatttggttttagggttgatttttttgtagggtaatgttttgtgaggagtagaggttgttattttgaaatttgagttgtataaatttagggtttatattttggtttgggtatttatagatttttttgagtttttgtgtgttgagtttagtgtagtgtttagtatagggagtatatttataaatatagttgttttagttttagttttagtttttggaagaggtagggtgtttagggtagtgtgattttgaggtggtaggtagtttgttaaaggggttatgataagagggaggtggagtttgtttaggggattgaagttaggaaggttatagagttttttagttttgtttgttatttgtattaaggataattagaatattttattatttgttttgtgggtgttgtgtttttgtgtagttgtattaggttttttgagtagttgttgatttgggggatagagggggtaaatgtatttttagtagaaaatagtttttattttgtaggttagtgagaatttttgaaaggttttttgtatttttgttttttgtgttatttattggtaggtagggattaggttttttaggtatatagtaaagttaatggttttttaaggttatagttgggagaggttgagttagggatggagtgtttagttttttattttgattaagtataatttggaattttggaatttattttgttttttattttttattttttatattttgatagtaggtatatttttgaaggatttttgaggatttttgattggttttatttttttgggttttttgttgttgttgttttgtttattagtttaggggttttatttaagatttttttatttaagggtttatagtttttttttaagattttttttgtttgtttagtttatggggaagaaatttgaattttaggttgggtatggtatatggatttaggtttggtttttgttattttgggttgggttttgatttattagtttagggagggttaagggtttattttttgttttttaaatttttaggttttttttgtttttggtattttttttgtttgtggtttttgttagtagtgtttatttttttttttattttattgttttttttttttagttttggttttttaagttgtttaagttataggtagggttaatttttattaagagagtaggttttagggtatatagaagttagtagaaagtatttgtaggatggtgtatgggggtgtgggagtatgtttttgttatttagtaataggtgggggttttatggggggtatatggtgggattatgatagttgttgtttagattatagtgaggtggtggtaatgttataggtggtttttgttatgttaggaagagatggtgtattttagaaattagtggtttttgttgggagtttttaggtaggtgttaagtttaggagtaggtttgttagagagaggaggtaagttagaaggaggaggaggtaagttagagggggtggttttagatattgtttttgatggtgatgttgtttttgtttatagttatatttaagtttagaggtttgtttattttgtaggtttggtagttttaagaatagttatgaagatttatttagtatttattaatttagaatttaaattattagaaggtttttttttggttttttggggttttttatgagatatatttatagtaatgtttttttagtttagggaaggatttttgtgaattttagaaagatatagtggggttgggttttatttttggatagttgttgggatggtggaaggagtagtaatgtattttagttg

SEQ ID NO: 252 - DNA, 6888 bp, Artificial Sequence
  chemically treated genomic DNA (Homo sapiens)
gtgttgtttgtgggttgttggttggttgtagtttgttggtgatgagggtattatagttgttttgattgtgtagattatgtatgttttggttttgggaatttattatgtattagaatatattagtgtttgtattttaaaaggttaaattattggtttttagttagggatttttggtaagtggtttgttagtgatgagtgtttgtttatattggtatatagtggagttttttgtttttggtttatttgtttttaggaaagttttggggtgaggtgaaggtgattgaagtaatgtttttttttttagattgtagttgtttaggggggatatagtatggtattttttattgaattttttttgtttgtttgtattttagtttttttttttttagtgatttttttatttttttttttttttttttttttgatgtttgattttagtagtaaaggaggtaaaaaaggtattgagttgttagttaaatttgaaaagtgtggttttgttttttttatagttattggtagttttttgtggaaggtttgttttttggggtagttgtggttttggagtggttgtgtttggtgtttgttgggtgtggttttgttttaggtttgggagggtaggttggttgttttggtgagtggtagagtttttttggatagtttttgtttatttaaatagaagatgttggtgttggagtgggtttggatatggtgaggttgtgagttggtttgagtggtggggtttggtgatttttttttttttttttgttttttttttttttttgtatgtatgttttgtttgtttttattttgtttttattttgggtgagtttgtttgtagtttggggtgtatatttgtatgtgtatttttttttatttatttttgtgtttgtttttatttttgtagttgagttttgttatgtgtgttttgtttgtttgttggttgtttttgttgtttttgttgtttttgggttttgatggattgaatgaaggttgtttatattgtttattgatgttttattaaagatttagaaggttgtgttatgaatttggagttgataatggaaagtttgggtattttgtatgggttggttggtggtggtagtggtgggggtggtggtgggggtggtgggggtggtggtgggggtttgggttatgagtaggagttgttggttagttttagtttttattatgtgggttgtggtgttgttggtttgttgtggggttttttgttgtttttaattgtgtattaggagttgggtatggtggtagtggtggtagtggtggtgttgtgtttggttatggttattagtatggttttgattttggatggtggtgattattggtttgagttttttattttgttgtattatgttatgagtatgttttgtgatttgtttttgtttggtatgggtatgagtaatatttatattatgttgatattgttttagttgttgttatttatttttattgtgtttgataagttttattatttttatttgtattattatttgtattattattattattattattattagtgtttgtttggtaatgttagtggtagttttatttttatgtgtgatgagtgtgggtttttggttatgaataatttttatagtttttataaggagatgtttggtatgagttagagtttgtttttgttggttgttatgttgttgggtaatgggttaggtggtttttataatgtgtagtagagtttgtttaattatggtttgttgggttatgataaaatgtttagttttaattttgatgtgtattatattgttatgttgatttgtggtgagtaatatttgttttgtggtttgggtattttatttgtggttatgatgttgtatttgaatggtttgtattatttgggttatatttagttttatgggttggtgttggtatttagttgtgagtggttatttttgtttttattgggtttgtaggtggttatgttgggttagttggaagaaattaatattaaagaggtggtttagtgtattatagtggagttgaagtgttatagtattttttaggtgatttttgtgtagagggtgttgtgttggttttaggggattttttttgatttgttttggaatttaaaattgtggagtaaatttaaatttggtagggagattttttgtaggatgtggaagtggttttaggagtttgagttttagtgtatgtttgttttatgtttggtaggtaaggttggggttagttaggggttaggttgttgggaagagggttttgggtttggtgtttgtggtttaagtttgtgtgttgagttattttttttgatttttttttttttttttttatatatgttttttttttttttgtttttatttttttttttatttttttttttttttttgttttttttttatttttttttttttttttttttttttttttttattttttttttgtttttgagtttttattgattgatttttttttattttatttgttttttttttaatgtgttaatttttgttttatttttgatttttttaggtattgggaggtgggatgggggtgtgtgtttttttttaggagttttgtttttttaagatttatagaaattaggatttgtttttatttaaaattttatgtattttaagttttttttagataatatattttaattttttgggttgattagtttttttgtgtagaggtagttgagaggttttgttttgtagagggaaaagagttttttatttttttatttattatataggtaaatttatttggttattggttgaaggtatagttttgtttttgtggggaattggtggttaggatataatagtgtttttggagtttatttttggttttggtgttggtgtagggattttttgattgggtttgaggggtttgggttagttttaatgttattatttatagtgagggtagggtgtaaggttgagaaggttatatttattgttttgggaggatgtgggagaagagattgaggtggaaagtgttttgttttgtttattggttgtttttgttttggttttagtgtttgttgggatttgttaggatttgttggggttttgggagattttgagtatttgtaggaagaggtgttgagaaattaaaaatttaggttagttaatgtatttttgttgttggttgtaggttttgtttttgtattaagtgggtgttgattgtgtgtgtttggtgattgtggggaggattggtggtttgtgggaggggatgggtagaggtgtgggttatattgttttggagttggtttggttttttgtgttttttttagtggttaagttgtgaggtatagttttttattgttttaggagtatagaaattttttgtgtgggtggtgggtgtgtgagttagagggaaagatgtagtagttattgtgattggtatgtagttgtgtgtttttgtgtgtatggattttgtgtggtgtgtgtggtgattgtgttgtttttaggagtaagttatgggtttagaggggtaaaatgtttaggttttttgttgggaaggatatattatattttatggtaagttagggtgggtgattttttatggattgggtggaggggggtattttttaggattggtgggtggtttaggggaataatttgtggtggtgatgatttgtatagtgtgggttttgggatgtgtgtggttttgagttagttttgtatagtttgtttttggagttgtgagtttaggtttttatttttgattttttgggttttttttgtattgttgagtttagtttgtggggtgtatttgattaatgtttgatagggttggggaatgtgataggtagtaggtttatttgggtttggggagggggagtttttgttttgatagtatttttttttgttgtttgttggtggatttttatttttagttggtaattgttttgtagtgttgatttaagaaggtaaagaaaattaggtttttttgtaaagagttttttttaaattggtggattttggatattttgagtggatttagaaatttatgtaattttttttttttagtttattttttatttttttttatagttttttttgatttgttgttggtttggggtaagataaagtagttagtagagagtgataataatagtggtgggaaatgaattggagattggttgatagtttttaatattttgttatagatttttttgaatgttttaggttgtttttggtgggttttagtatttgttggttttttgggtattggggattagaaggaatttggtagttggttttaggggtatagttaaaggtaggatgatagttatttttttgtttattttagagtgttgttgtttttttatgttggttgtgtaaagaatatagtttttaaaaaatatgtgttttttgtttatataggtttgaaagtgatgaggaaagtaatgttttgtttattagtgagttttagtttttaaaatgattttaagtgttgttgagatgagaaagtgtggtattttgggggtttttagttttatttgtgtttatggtgtaagtttgtagggataggtttgggatagtattgtttatgttgttagattttttgtagaggattgttgaagttgtttttgtgggagatagaatgttttttttagtgagtggaaaaggtttgttgaggattttgttttgtttgagtatttaaatgtgtgtttgttttattattttgggttgaaaagggataagagttttagtttttttatttggttattttattagtaattataagtgtgttgagtggttattattatataggaggttttttagtttggggttagtagattagtttttttagatattgatgtagaagttgggattggtaagtaggtattatgtgtttggagtgttaggggataggagtaaatggagaagaaaagtggaggttttttttgtttggagtattgattggaatttttgttggtatgttgtagagggtttttgttgttgggttttgggggtttaataagtttagttgttttgtaggtggtttggttggatttttagattggtgtttggaagatattgtttttgttttttttttgttaaatttgtttttttttttttttttataggttataggtttttttttttttttattttggttttgtttttgggttttgttaaatagttaagtaggttggggtttagggggtttagaatgaagaggtttgatttggttagtgttggtaaagtttatttttaggtgaggttataatagaggtaggttttttttgtttagtttgttggtgtagttatagttaagggtggtatttgaaaggaaaagggagaaaattttggagaaatttagattgttttaatgttagattttagagaaattgattttaaatgtatggatttgtttggaaagggtggttaagtggtaggtggttgtaattttgtttggttgggtttttgtagaggttttttaagattagtttttgtagggtggtttttagtaatttgataagaggtggttaagataaatttttgtgggtttgagtatatatttttgggtgttgggttttagagatttttaaattaagtataaataagaagggagtgagagaatttaggttagaatttgtatgggtattttattgaggaaaagtgaggttttggtggtaggtatgtttttttttgatgtttgaaaattgagttgagtgtttgattatatttattgtagaggtttttgtttttagtgagtttggattttttagtggtttgtttggagttggtttttagtttttgttgtagtttgatgtatggtttttttttggtagtaagtttttagtggttagtttgaagttaattttgtttaggtggttgagggtttttagttaatttattatgatgttgtttgggttatttgatgtttgtagtggtgggatatggtttgggtagtgtgtagtggtttttgttaggggtattgtgtgtgtgtttgttttttgttgtgttggggatgtttttgggtgatatgggttgttgggtattttttaagttgaggaaatggattttttttgtagagttttgtgtttattttttaattttttattttgttttttgttgttagggtttttgatttagtttattttttttggtggtttagttagggattagagttggagaggttgaatgtaatttgtgttagtatggaatagatgatatgtttgtttgttagttgtttggatgaataattgaaaagtttgttgtagtttgtgttttgttaagttttgggtgttgggagaatatttttttaatatgtattagggtgggtgggagtgggtagaggaggtgggatttgagggaggagagtgaatttgagtaggagaagtagtttaggtagttaggtgtttttgatgtgagaggttgggtatttatttttattttaggttttttattgtgtggttatgttatttttttaaataaatgtgtatatggagggagattgatgttgataatgtttagaagattaaaagagtattaatgttggtaataataatgtaaatgtgtggatttagattttattgatttggaatttgatttggtgtgtttttagtaagtttgatggtgtgttttttttagtagagtgtttattagtgttatggttttgtggttttttagtggtgttgttttgttagttttgtgtgggtttttttgtttgattgtagttttttttttgtgaggttttagtttgttttatttttttgaggtttttttttttttttgtggggttttttgttttttgtatttttttttttgatttttgtattatttgtttttgtgtgtatatattgttatttgtgtttttggtgatttgtttgggtggttgggtttgtgaagttaatgtgttgaatggtgtttg

SEQ ID NO: 253 - DNA, 6888 bp, Artificial Sequence
  chemically treated genomic DNA (Homo sapiens)
tgggtattgtttagtgtattggttttgtggatttagttgtttaggtggattgttggaagtgtaagtagtggtgtgtgtgtataggggtgggtggtgtagaggttgggggagggggtgtagagggtagagagttttgtgagaggaggagaaaattttggggaagtaaggtgggttggggttttgtgggggaggagttgtggttagatgggagaatttgtgtagagttggtgaagtggtattgttggaaaattgtggggttgtggtgttggtgagtgttttgttgggaagagtgtgttgttgggtttattggaaatgtgttggattaagttttagattaatgaaatttgggtttatatgtttatgttattgttgttagtattaatgtttttttaattttttaaatattattagtattgatttttttttatatatatatttgtttgagaaagtgatataattatatagtggaaagtttggaataaaaataaatgtttagttttttgtattgagggtgtttggttgtttgggttgttttttttgtttgggtttattttttttttttgggttttgttttttttgtttgtttttgtttattttgatgtgtgttgggaaggtgtttttttggtatttgggatttgatgaagtatagattgtagtgaattttttaattatttatttaagtagttagtaggtaaatatattgtttgttttgtattggtatgggttgtgtttagtttttttagttttgatttttaattaaattgttaggagaggtgggttgagttgggagttttagtagtgagaaatgaggtgggaggttggggggtgggtgtgagattttgtgaagggggtttgtttttttggtttgggaggtgtttagtggtttgtgttatttaaggatgtttttggtgtagtgggagataagtatgtatgtggtgtttttagtaggagttattgtgtattgtttgggttgtgttttgttgttgtgggtattaggtggtttaggtgatattatggtgggttggttaagggtttttggttgtttgaatagaattggttttagattggttgttgggagtttgttgttaggagagggttgtgtgttggattatggtggggattggagattagttttgggtaggttgttgggggatttgggtttattggaggtggaaatttttgtagtaaatgtagttgggtgtttggtttgatttttgggtgttggaagaaaatatgtttgttattgaggttttgtttttttttagtgggatgtttgtgtaagttttagtttgggtttttttattttttttttgtttgtgtttggtttagaggtttttggggtttaatgtttgagagtgtgtgtttgaatttgtagaaatttgttttggttgttttttgttaggttgttgaaaattgttttgtaagggttggttttggggaatttttgtgaaggtttgattgggtggggttgtaattatttgttatttagttgttttttttgaatgaatttgtgtatttggagttaatttttttgaaatttaatgttggggtaatttaaatttttttgaagtttttttttttttttttttaagtgttatttttggttgtgattatattggtaggttgggtaggaaggatttgtttttgttgtgattttgtttaagggtgagttttgttggtgttggttaaattagatttttttattttgagttttttaaattttggtttgtttggttgtttggtaggatttgggggtggggttaaaatgagagagaaagggaatttataatttatgagagaaagagaagaggtaggtttggtgggaggggggtagggatggtgttttttaggtattggtttgagagtttggttgagttgtttgtggagtggttgggtttgttaaatttttggggtttaatggtgagggttttttgtggtgtattggtggggattttgattgatattttgggtggagaaagtttttgttttttttttttatttgtttttgttttttagtgttttgagtatataatatttatttattagttttagtttttgtattagtgtttgaagagattgatttattgattttaaattgaaaagttttttatgtaataataattatttaatatatttgtagttgttgataaaatggttagataaaaaggttaaagtttttgtttttttttaatttagggtaataaaatagatatatatttgaatgtttgagtaaagtggggtttttagtaggttttttttatttgttggaggaggtattttgttttttatgaaggtagttttagtgattttttgtggaaaatttagtagtgtgggtagtgttgttttgggtttgtttttgtagatttgtattatgggtgtgggtggggttgaggatttttgggatgttatgtttttttattttagtaatgtttgggattattttaaaagttgaaatttgttaataggtgaagtattattttttttattatttttagatttatatgggtagaaggtatgtgttttttaaaagttgtgttttttgtgtgattggtatgagggggtggtagtgttttgagatgagtaggagaatagttgttattttgtttttaattgtatttttaagattagttgttaagttttttttggtttttggtgtttaagaagttggtgggtattaaaatttattagagatagtttgggatatttggggggatttatgataaaatgttaagaattgttagttagtttttagtttattttttgttgttattattattgttttttattggttgttttattttgttttgaattaatagtaaattagagaaaattgtaggagaggatgaaaaataaattaaaggagaaagattatataaatttttaaatttatttaaagtatttggagtttgttgatttgggggaggttttttgtagggaaatttagttttttttatttttttagattaatattgtggggtgattattgattgggaataggaatttattagtagatggtaaaggaaaatgttgttaaagtggaaattttttttttttaagtttgggtgaatttgttgtttgttatattttttagttttgttgggtgttggttgagtgtattttataagttgggtttagtggtgtgaggaaagtttgggggattgggggtggaaatttgagtttgtagttttggaagtgagttgtgtgaggttggtttggaattgtgtgtattttaagatttgtgttatgtaaattattgttattatgaattgtttttttagattgtttgttgattttgaaagatatttttttttatttgatttatgggaagttgtttattttggtttgttatagggtatagtgtgttttttttagtgggggatttggatattttgtttttttgggtttgtggtttgtttttaggggtagtgtagttgttatgtatattgtgtggggtttgtgtgtataaaagtgtgtaattgtgtgttagttgtagtaattattgtatttttttttttagtttgtgtatttgttgtttatataggaggtttttgtgtttttagaataatagagggttgtattttgtagtttggttgttagaggaggtataaagagttgagttggttttagaataatgtaatttgtgtttttatttgtttttttttgtgggttgttagttttttttgtggttgttaggtgtgtataattagtgtttgtttaatgtaaaggtggagtttgtagttggtggtagggatgtattaattaatttgaatttttaattttttagtatttttttttgtgagtgtttagggttttttggagttttggtaaattttggtaaattttagtaaatgttgggattggggtaaggatggttggtgagtaaggtaaagtgttttttattttagtttttttttttatgtttttttaaagtggtgaatgtgatttttttaattttatattttgtttttgttgtaggtagtgatattggagttggtttgagttttttaagtttggttagaaagtttttgtgttaatgttaaggttagagatgggttttaggagtgttgttgtattttggttgttggttttttgtgggggtaaggttgtgtttttagttaatgattaaataagtttgtttatatggtgggtgggagagtagagagtttttttttttttgtagagtaaagttttttaattgtttttgtatagggagattagttagtttggaaaattgaaatgtgttgtttaaaagagatttgaagtgtatggggttttgaataagggtaggttttggtttttgtgggttttggaaagatagggtttttagaggaaaatgtatatttttattttgttttttagtatttgggaagattggaaatagggtaaaggttggtatattgaggggagggtgaatgaaatgggggggggttggttaatgaaagtttagggataaggagagagtaagaaagaaaaagaaaagggagaagggaaagtaggggaagagtggaagagaaagagaaaatggaagaagaaataaaaatgagaagaaagaggatgtgtataggaaagagaaggaaagaattaagagaagtgatttggtgtgtagatttgggttataagtattggatttggagttttttttttagtagtttggtttttggttagttttggttttatttgttaggtgtaaggtggatatgtgttggaatttgggtttttgaagttatttttatattttgtggaaggtttttttgttagatttgagtttattttatggttttggattttggagtaggttggagagagttttttgagattggtatagtattttttgtgtaaagattgtttgggggatattgtagtgttttagttttgttgtgatgtgttgggttatttttttggtgttgattttttttagttggtttgatgtggttatttgtgagtttgatgaggatgagggtggttgtttgtgattgggtgttagtattggtttgtgagattgagtgtggtttgggtggtgtaggttgtttaggtgtgatattatggttgtaggtggggtgtttaggttgtgggataggtgttgtttattgtgggttagtatggtagtgtggtgtgtgttgaagttggggttgagtattttgttgtggtttggtggattgtagttgggtagattttgttgtgtgttgtggaggttgtttagtttgttgtttagtggtgtggtggttagtggggataggttttggtttatgttgggtatttttttgtagggattgtagaggttgtttatggttgggagtttgtgtttgttgtgtatgagggtgaagttgttgttgatgttgttggataggtgttggtggtggtggtggtggtggtggtgtggatggtggtgtgggtgagggtggtggaatttgttagatatggtggagatgggtggtagtggttggagtggtgttagtgtggtgtaggtgttgtttatgtttatgttaggtggagatgagttgtaggatatgtttatggtgtggtgtagtgggatggagagtttgggttggtagttgttgttgtttaggattgaggttatgttggtgattatggttgagtgtgatgttgttgttgttgttgttgttgttgtgtttagtttttggtgtgtggttggaggtggtggagggttttgtagtgagttagtggtgttgtggtttgtgtggtgggggttggggttggttagtagtttttgtttatggtttgggtttttgttgttgtttttgttgtttttgttgttgtttttgttattgttgttgttggttggtttgtgtaaagtgtttagattttttattgttagttttgggtttatggtgtagttttttaggtttttggtgaggtattgataggtggtgtaggtagtttttatttagtttattagggtttgggggtggtgggggtggtgggggtggttggtgggtgggtaaggtgtgtgtggtggggtttggttgtgggagtgggggtgggtgtgggagtgagtggagaggagtgtgtgtgtgggtgtgtgttttgggttgtgggtgggtttgtttggggtgggggtggggtgggggtggatggggtgtgtgtgtgggagaggggaggggatggggagggagggagggattattgggttttgttgtttgggttggtttgtagttttgttatgtttgagtttgttttggtgttgatgttttttgtttgggtgagtgggagttgtttagaagggttttgttgtttgttggggtagttaatttatttttttggatttggggtggggttatgtttgatgggtgttaagtgtaattattttgaggttgtagttgttttgggaggtgggttttttatgggaagttattagtggttgtggagggggtggggttgtattttttaggtttggttgatggtttggtgttttttttattttttttgttattggaattaaatgttaaggagagggagggaggagaaggtgggggggttgttggggagagggaggttggagtgtgagtgagtgagagagatttggtgaaagatgttgtgttgtgttttttttgagtagttgtgatttgggggaaggggtattgttttaattgtttttgttttattttaaagtttttttggaggtgagtaagttgggagtaaaagattttgttatgtgttagtatagataaatatttgttattaataagttatttattgagagtttttagttgggagttaatagtttagttttttaaaatgtaggtgttaatgtattttaatgtatggtaaatttttgaggttgggatatgtataatttatgtggttagagtaattgtagtgtttttgttgttagtgagttgtggttggttggtggtttatgggtggtgt

SEQ ID NO: 254 - DNA, 2473 bp, Artificial Sequence
  chemically treated genomic DNA (Homo sapiens)
ggatatttttgtgtgtgtatgaatgtatttgtatgtgtgttagttttttagtgtgggtgtattttttttatttttttaggtatgtgttgtgggggaagggttggtttaaaggtatgagttagaggaaggattgtatgttgtgaaggttttttttattttatgttgggtttttgtatttgtgttttagtttttttgttgaatttattaatgagatgttttttttgtagggattggttttgttattgagattttaggtttttgttagttattttttttttttatatttttagttatttttggtaggttttagttttggttttatttgtgtttttgttttagttgtagttatgttgtatattgagggttatgtttttttttgggtggtgggttagggtaagttatgtttggtttgtttgtttttggagggaggtgtttatgtgaatgagggtgatgtgtagggggagattgtgttaatggtagtttgttgggtttgttatgatgatttttagaataaggtatgtatggtatgttattttttggagtaaggtgtggattttaatattgtagattgattagggtgtatggtgtttatgtatgtttgtgttgggggtgggggtgttgtggtggttttgttgttttttgtttatggtgtagattttttagtttgagattatgtgggtgttttggtttttgtttatgttttggattgtggggattgtgagatttttgttatattgttggatgtttgtaaggttaagggtatggaggttattattattattattgatattttgtttttaggtattaagaagatttggtagtattttaattttttattatttttaggggtggaggattttgtttttgttttttttagtttggggttttgtatgttgtttttggaaatttaattgtagattgttggaggaggagggtgtgggatgttatttttttgtgtttaggaagaagaggagaagtgggatgtatttgaattttttttttttaagttttttgatgatttatttttttttgagttgttttttaaattattatgttattttttaaaattatttaaaaggtttaattttgagttttggggtttagtggtttttttttaattagttttatttattgaagggagattggggattgagtgtttgattgttgaatttaatggtttgattttgattggttgattttgttttttttgatgttatagtattgaaggttttgaggatttgtttttatgggtggagaaagtgattagtgggggtttttttttttgttgaaatatagtattagaagtttaggagtttggtttttttttagggttgaggtagaaattgagttgtatggagttagtggagttggatatttttggatatttttgttttgatttgtttgagtttagttgtttgtttttggagtgttgttgatatagtgtttttttgttgattttttttttagttggtttggttttttttttgtgttagttttaggagagtttgttaggggtagtatttttgttaagtggaaggaggtggagtttggggttgttggagtggaggggtttggggatgttgtttttggattatattttgtaaatgtggttgggttttttatttttttttaatgttagtttttatttttttatttttgatatttgtttataatttggaggttgggtgtttttgttgtttgtttttttttatgttggggtgttaggtttttttaggattaagtgtaaattggtgagatgttattttatgtagattgagtagatttgtttgttggggggtttttagagtttaggtgggtttggggagttagggtgttgagaggagtgagaggagttaaggagggtggggattaggattttaatgggataggtgggagaattagtttatatatatattatgaataaagggattttttgtatgtgtttatgggtgtatagtgtatttatatatggttaaatatgtgtttataagtatagtatttttattagtaagaaagaataagtattttatttattgggtatatatatatatgtatttatgttttggttattttatatgtatatgggattatttgtgtatttataggtatagtatattaataaatatatagggttagggttttaaatttttttgtatttgtttagaagtagtagggaatttttatttatgggtagtttttgatgtttttgtttttttgtagaagtaattttttgttttttatgtatgttttgaaatatagtttattatgattttgtatattttttttgtggatattttagtttattttgtaggttttgtttttttttttaggtttggttttttatttatattttgtttttaattttaattattttttaggatattttttttattttttttgggggtttttgtagtaatttttagttttagttttgttgttgtttttattgtttttaattttattttttaatttt

SEQ ID NO: 255 - DNA, 2473 bp, Artificial Sequence
  chemically treated genomic DNA (Homo sapiens)
gaagttgagaagtgaagttgagagtagtaaagatagtagtagaattgaggttgggggttgttgtaggaatttttaagaagagtgaaaaagatattttgaaaagtggttggggttagaagtagggtgtgaataaggagttaggtttggagaaagaagtaagatttgtagaatgggttgggatgtttatggagagagtgtgtaaaattatgataggttgtgttttagggtatatatggaaagtaagggattgtttttgtaggagggtaaagatattggagattgtttataagtaagggttttttattgtttttgaataaatgtaagagagtttgggattttagttttgtgtgtttattgatatgttgtgtttgtaggtatataagtaattttatatgtatgtgaaatgattagggtatgaatatatgtgtgtatatatttagtaaatagagtatttatttttttttgttaataagagtattgtgtttatggatatatgtttaattatgtgtgggtgtattgtgtatttatgagtatatgtaagagatttttttgtttgtggtgtgtgtgtgagttggtttttttatttattttattaaggttttaatttttattttttttggttttttttattttttttagtgttttggttttttaggtttatttagattttggaagttttttagtaggtggatttgtttagtttgtatggagtggtgttttattaatttgtgtttggttttgggagagtttggtgttttggtataaggaggggtaggtaatgaaggtgtttgatttttgggttgtgggtgaatgttagggatgggagggtggggattgatgttgagagggggtaggaaatttggttgtgtttgtgagatgtggtttaggagtaatgtttttgagtttttttgttttagtagttttggattttgtttttttttgtttagtggagatattgtttttggtagatttttttgggattggtgtggagagggagttgagttggttggagggagggttaatggggaggtgttgtattggtggtgttttagggataggtggttggatttaggtgagttagggtaaaggtgtttaggggtgtttagttttattggttttatgtggtttagtttttgttttagttttgaagggggattagatttttgagtttttggtgttgtgttttggtgagagagaggatttttgttagttattttttttgtttatgggggtgggtttttagggtttttggtgttgtgatgttgggaaagatggggttgattggttagggttaggttattgaatttggtagttaagtgtttgatttttggtttttttttagtgggtgggattggttgaggaggggttattaggttttagggtttggagttgagttttttgagtggttttgggggatggtgtggtggtttggggagtggtttggaaggggatgggttattggggggtttaggaagagggaatttaaatatgttttgtttttttttttttttttgggtgtgaggggataatattttatgttttttttttttagtggtttgtagttggatttttgaaggtgatgtgtagaattttgggttaggagaggtgggagtagggttttttatttttggggatggtggagaattgagatattgttgggtttttttggtgtttgagggtgaggtattggtggtgatgatgatgatttttgtatttttggttttgtaggtgtttagtagtgtggtaagggttttgtggtttttgtggtttagggtgtggataagagttgaggtgtttgtgtgattttggattgaggggtttgtgttgtgggtaaggagtagtgaggttattgtggtgtttttatttttggtgtaagtgtgtatgagtgttgtgtgttttaattggtttgtgatattggggtttgtgttttgttttaggaggtagtgtattatgtgtgttttgttttgggggttgttgtagtgggtttgataggttgttattagtgtagtttttttttgtgtattatttttatttatgtaggtgtttttttttagaagtaaatgggttaagtgtagtttattttgatttattgtttgaagaagagtgtggtttttggtgtgtaatatagttgtggttggggtgagggtatagatggagttgggattgagatttgttgaggatgattaggggtatggggagggggagtggttggtagaggtttgaggttttagtgatgaagttgatttttgtaagagagatattttattgatagatttggtaggaaaattgaggtatagatgtagggatttagtgtggggtggaggagatttttatggtatatagttttttttttaatttatgtttttgagttggttttttttttgtagtgtatgtttgaggaggtgggaagggtgtatttgtattgaaggattagtgtgtgtgtaaatgtgtttgtgtatgtgtagggatgttt

SEQ ID NO: 256 - DNA, 2425 bp, Artificial Sequence
  chemically treated genomic DNA (Homo sapiens)
gtttagttggaattagttaatttgtaaatatagtttttattttaaaaattgtgaaatgatgtttttttaaatggaaaaagtattaaggagaagaaaattgatttagttatagggtttttgggggaaaatttttagtattatttttttttttaattatagtaaaatatggtgggatataagaattaaatatttattgagtattttttttgtgtttattataattttattttaatttttgtaaatgtgattgtgattttgtgagttagattatagaatttttgttgatagttataattggtaggtatagaaagtgtaaagatggagtttggaatggaatttggtttgtttgattttaagttttggatttattgtaatatattataattgttagttttgtaaaatgttttttttttttttttatttatttttatatttaaattaaaatttagtaaattaaattttgagtagtagaaaaaattttagtaaaggtttttttatttttgaagaattttttatataaggatatttttttttgtttttttttttatgtagaattttattaaaggttagtaagaatgggttgttgtgtttttttttaaattttatatagaagtttttaattttgaggtaaatatttgaatggaataaatgagtatgatttgggggttaaggtaatttttaagtgtgtgtatgtgtgtgtttgttttaaggtataataaagtttagagattaaggttgagttaaaaaataaatgaggataaattaatgaggataaattagtttgttgaggtgtggttagagtagtagtaattgtggttgtttttttgataaaggttgtgaagatggtatgttttatttttatttgtgtattttttttgatattttatttttttatgaagttttagaggtgttttaaaattgtgttaggaaatatatagagataagaaaaggtaaatggttttgatttagtgttttagggaagaggttggaaaggaaatgtggtgtgagtggggtgggagagggggtttgtggttttgtttttgtttgggttgaagattgagtaaggtagggtttttttttttgtggatgggttttttttttattttattttttatttatttttggttttgtgtgtatgtgtgagatagtttagtgggtttatagataatgattattagagattaaagaaggaaagttagtgagtttgaatataggtgttttgtgtggaaatgtttaaggagattgttagaagtgtgtaagttggagttggttagagttttttttttattgagagggggagtttggtgtttttggttgggagtgatttggagtttttagttttgtgttttagttgttgttagtgttagttttggatttggtggattaggaagaggagggaggggggagagagtgtgaagagggaggggattgaagttggagggttttgagtttagtgttgtgttggtgtagagaaatttttttttttggttttggagatggtgttttggttgtgttggagtggagattgttaggtttggaggaattggtagttttttatgtttttgtttgaagtttgatttgattgttttttttagtgaggtatggagatttatttaggtttttttttggttgtgaatttaggttttttttaggtagtgtggaattgtttagaagttgatattttgaggggtggtgggggtggatagttttggttattagtgtttgggaaggagggtgtggggttgtgtgtagttgttggttagtaggttgtaaaaaattaggatagttaaatgtttagggagttgtttagtattaaaggaggttaagatttgttgatgtttgttatggtagtgtttgagaaatgattgggggagtttagtgaggttggggatgtagtggtttttgggttttagaaatttttttagttttttgtggtaattttggtttggtggtggggggttggtgagtaggaattggagggaggtggtggggaaattgtggatttgtttggttgagggtgtgtggattagattgggttgagtaggtaagttattgttgggttatagtgaggtgatttaggagtgaatttttagggtagttttttttttgttggtgttgggagagaatgtgggtatgggggtggggaggtgtgaagttttgaggttgggttgtggatattttaaagtttagagttgggagggtttaaaggaaggggtggtgtttatatggttatttttttgttgtgtgggttaagtagttttttttggagggtgtaaggtgtggtgggggtgatgagtttttgggtttttgttttgattgttaaatttgtttggttgggtttatttttttgtggttttatttgttatatggattagaatttggagtaggtagttttttttattttgaggtttttgtggttgttgtg

SEQ ID NO: 257 - DNA, 2425 bp, Artificial Sequence
  chemically treated genomic DNA (Homo sapiens)
tgtggtagttgtaggagttttagaatagagagaattgtttgttttggattttgatttgtgtggtgagtgaggttatgagaaggtggatttggttaagtgaatttagtagttggagtgagaatttaagggtttattatttttgttgtgttttgtgttttttagaagaagttatttgatttgtgtagtagaagggtaattatgtggatgttgtttttttttttgggtttttttagttttgagttttaaagtatttgtggtttggttttggagttttgtgtttttttatttttatgtttatatttttttttagtgttaataaaagggaggttgttttggaagtttgtttttgggttgttttgttgtgatttgatgatgatttgtttgtttagtttagtttgatttatgtatttttagttggatggatttatggtttttttattgtttttttttagtttttgtttattggttttttgttgttggattaaagttattataaaaggttaaggaggtttttggagtttggagattgttgtgtttttgattttgttggatttttttagttattttttaagtgttgttatagtaggtgttaataggttttagttttttttagtgttggatgattttttgagtatttagttgttttaattttttataatttgttggttagtggttatgtgtagttttgtgtttttttttttgggtattggtggttggagttgtttatttttattgttttttgggatattagtttttaagtgattttatgttatttggagggagtttgggtttgtagttagggaagagtttagataaatttttgtattttattgagagaggtagttgggttaggttttgggtaggggtgtggagagttgttggtttttttgagtttggtgatttttattttggtatggttggggtgttgtttttgaggttgagagggaaagtttttttatgttaatatggtgttggatttgggattttttagttttggttttttttttttttgtgttttttttttttttttttttttttttaatttgttgaatttaaaattggtgttggtggtagttgggatgtggggttggggattttgggttgtttttggttgggaatgttgggtttttttttttggtgagaaggaaattttagttgattttggtttgtgtatttttggtggtttttttggatatttttatatgggatgtttgtgtttaagtttgttgattttttttttttaatttttgatggttgttatttgtgggtttattggattattttgtgtgtgtatgtggaattggaggtgggtggagggtggaatgagagagaaatttatttgtagaaggaggggttttattttatttagtttttagtttggatagaagtaaaattataggtttttttttttattttatttgtgttgtgttttttttttagttttttttttgagatattagattaggattatttgtttttttttatttttgtgtgttttttaatataattttaaaatatttttgaggttttatagaggggtaaagtgttaaaagaaatatatgaataagagtaaaatgtgttgtttttatagtttttattaagaaagtagttatagttgttgttgttttggttgtattttagtggattggtttgtttttattggtttgtttttatttgttttttaatttggttttaatttttggattttgttatgttttaaaatagatatatatatatatatatttgaaaattgttttaatttttagattatatttatttgttttatttagatgtttattttggaattaaggatttttgtataggatttgagagaaaatataatagtttatttttattgatttttggtaaagttttgtgtgggaaagggagtaagaaggagtatttttatataagaagttttttaaggatgagaggatttttattaaaattttttttgttgtttagaatttagtttattaaattttagtttgagtgtgaaaatagatgagaaaaggaaaaaggtattttgtaaagttagtagttataatgtattatagtggatttagggtttagagttagataggttagattttattttaaattttatttttatgttttttgtgtttattaattataattgttaataggaattttataatttagtttatggagttatagttatatttataggagttaaaatagagttgtgataggtgtagagaaaatatttaataaatatttggtttttatattttattatgttttattgtaattaggagagagggtggtgttagaaatttttttttaaagattttgtaattgaattagtttttttttttttaatgttttttttatttaaaaaggtattattttataatttttgaaatggaaattatgtttatagattaattagttttagttgaat

SEQ ID NO: 258 - DNA, 3954 bp, Artificial Sequence
  chemically treated genomic DNA (Homo sapiens)
gggttgtagttggagaggaataggaattgtagtggggatgttttggtttttgggtttatagtatttgggatggatgtgtagtagtgtgggttgggaattgggtattagggtgggatgggtgagaggttttaagggataaggtagggagaagtgtagtggggtgtggggaattgtatgttttttttttgtttttgttttttattttgaggtggtagggtgggtgggtgtggttttgggggtgggtgggttgggtggggtggaggtggggttgtagtattggttttatttagttttttttgtttgtagttagagtgagttgagttgtggttagttttggtgggtagggggggtgttggagtgtagtgtagtgtagttttattagtttgtaaagtggattgagttggaagttgagtgttgttgtgggaggtgggtgatgggggtaggtgttattggttgtgttatggatgggttgtgtttgttgttgttgttgtttttgggggtgagtgttagttggagggggtttgtttttttttttgggattagaattttgagaagagttgggtgttgttattaaggaaatagaatagagtattggggttttagatattgagggtgggtggtgggaaaggatttttgatgttgggattatgaaggagggtttagggtttttggagtgtagaggtgattttttagggtggagatgagggtaagattggagtatggatgttggtttttaggtattgtagggggtggtgggggagttgggaggggttttttaagagggggtatggggttttttgatgtttaggttttttggaagaggatatttgaatgttgggattttgaagggattttttttttagtattttggtttttggagagttgtgggatagaattaaggtgagagaaggagggggaattggatggggattagagatgagaggggtgagttgggttggggtggggagtttgggatgatgggatggaataatggaggaggttggagggattggaggtagaggggatttggtaaggataatggggattggttagataatgggggggaggggtgttggagggagaggttggggagtgggagagaggttgagaagtgggttagggagggtagaagaggggtgatggtgagggtggtagagagatggaagtagaaggaaaggagatagagtggggtgtggattttgaagtggttggggttttgtttgtttgttgagggatagtgagatgagaagagagagtagaggtttggatatttttagtgtttgtttttgtgtttttgtttgtggttttttttagttttggaattggggttgtggatttaaggttgggaggggagtgtttattttgttggggtgaatttgtttttggggtttttttatggttggtgggtttttttgatgtgtgtgtttttatggtttgaagtagtgtagtggattgtgagggatggagtgggtgtgtttttatttgggttggtggtggttatgttttggggtgtagagtgttggggtgtattaggtggggattttttttggttgtgtgtagttttggttatgtaggtgggaggtggtaggtagggggtgttgtggggtgaggtaagtgtagtttgttgttgtttgtttgtgagtttggggttgtgtgttgttttttatttagttgtgtgatttgagtgttgtgtttattgtgttttgtgggtttttgtgttttgaagggttgggatttggtttgagttttttttggtttttggtgtaagttgttgggtatttaatgagatgggggtgtttggatgttttggattttgtagtgtggtattttgggttattgatttggtaaaggttggtgggttttttgggtggtttgatgagattgttagatgtggtttgttttatggttatgaattgaatgttttggaaggtttggtaatggaggaggtgtttttattttttttgttagtattttttattagagtattgtgttttaaattttggttttatagatatggagattgaggttttgagagtttaaatgatttggttaagattttatagtaagttgggttagagttgtggttagattttttgatttgatttttagtttggtatttttttatttttttagggggtagttgttgttttagtttggggttatggttgtgttttttagtagggtggggggggttgatattgtttttagagtttgttggtggtagagtttgtgggtgaggtgggtagagattttgtttgggtgtgggttttagtttgaaagtttagttttagttttttggagttgttaggatttgtggttgtgtttggggatttgggagtgattgtgggtatgtttgttgattaatgttgttggttagagatgttgtttagatgtgggtgggtgagtgtagattaggagagtggggaggagggattggattttagaggggtaatgatttgggttttgggtttgggtaagagtgagggtttttgtgtgaagatttaaggaaggaggggagttgggtgtggaggatttgggtgtttgggaaggtgtattttgataggaatttgttgtttgtagtttttgtggtttttgtttttgttttggtgtgtggttgtttggtttgggatggttgtgtgtggtttgagtttttttttgggttgtggtgagagagagagggttgaaattagagtgtgttttggtgggttggttggtgggttgtgttggtaatggaggtattttgttatttagatgtttgtaattagagttgttgggttggttaatgtgtttaatagggatggaatgagggtagtaaatgggtgtgtgtgagtggttgggttgagttgggtggatggtggatggggaggtagttttgtgggggatgggtttttattgtattgttttagtttagtttggtttaagtgttttgttttttttttgggggattgtgtggggaggtgggaataattgtatgtgttgagtttttattaagtgttttgtatttttttggtagttttttttgaattatttaatttttataaggttttagtaaggtgaatttagttatttttattttgtagttgaggaaatagaattttttagatttttaggtttgagattaggtttttttagtgagttagtggtggtgtttttgttggaatttaggatgtttggtttgggatgtttttttttttatatatgttaggtttttttttgttttttattttttagattatggaaggagttgtggttttgagagattaaattgtgttttatgtttttggttttatatatttagatttgagttttttttttatatgtagaggttttgtttttttttaagtttttatgttatattattttgggtaattagtttttttttttttaattttttttttatttaaagggagtgaggggtatgtgttagtgttttttttgggtttgtattgattttaaaaggttttttaggtgtttgaaaattttttttattttatggtggtgattatggttttatttatttaagagttttttgttgaagttgttggaatggttagggttgattatattgaaatatttgtatggttttaaatatttttaattgttttgttgttttttttttttttttaattaaaaaaaatgaaaatttttaaaagttaatttatttaaggatttttttattttagttttttgtaagttttgaaatggttaaaataaaaagattataagtgtttttaaaaatgagatgaaattattttgttaaatgtgaaatgattaagtgtaatatatataaattttagggaaatttatttgttatttttataaattaatttttttggatttgattttggagtaattagtttgaatgttagttatttttttttatttggttaaattttttttttttgtttggggtttttttaagatgagatgtttttttgataattaatatttatt

SEQ ID NO: 259 - DNA, 3954 bp, Artificial Sequence
  chemically treated genomic DNA (Homo sapiens)
aataaatgttagttattaaagaagtattttattttaaggagattttaggtaggaggggagagtttagttaagtagggaggggtgattaatatttaggttaattgttttaaaattagatttaaaaggattaatttatagggatgatagataaatttttttgaaatttgtatgtgttatatttagttattttatatttgatagaatgattttattttatttttaagaatgtttgtaatttttttgttttggttattttaaggtttataaggaattaaggtggaaggatttttagatgaattgatttttaagaatttttattttttttaattagagaaaagagagaaatagtgaaatagttgaaagtatttgaaattatatgaatgttttagtataattagttttggttattttaatagttttagtaaagagtttttaagtgaatggggttgtggttattgttatgggatgggagagatttttaaatatttggagggttttttgaggttgatgtaaatttaggggaggtattggtatatattttttattttttttggataggggaggagttgggaggaaaggagttaattatttaagataatgtagtatagagatttgagagggggtagggtttttgtgtgtggagaaggggtttagatttaaatgtgtggggttaaaggtatagggtatgatttaattttttagagttatgattttttttatgatttagaaggtagggggtgggagggagtttggtatatgtaggaaagagaatattttaggttaagtattttgggttttaataaagatgttattattgatttattgggggagtttggttttgggtttgaaagtttagaaggttttgtttttttaattgtgaagtgggaataattaaatttattttgttaggattttataaggattaaataatttaagagaaattattagggaagtgtaaggtatttagtaggaatttagtatatgtgattatttttgtttttttatgtggttttttagggaagaagtgaggtgtttgagttagattgggttggaatagtgtggtaggggtttgttttttgtggagttgtttttttatttattatttatttagtttagtttggttgtttatgtatgtttatttgttgtttttgttttatttttattaggtgtattagttagtttggtggttttggttatagatgtttgaatgataaagtgtttttattattggtgtggtttgttagttgatttgttgggatgtgttttggttttagtttttttttttttattgtggtttaggaagaaatttggattgtgtatagttattttagattgagtagttgtgtgttgaggtggaggtgggagttgtaggggttgtagatggtaggtttttgttggggtatatttttttaagtgtttaggttttttatgtttagtttttttttttttttgggtttttgtgtggggatttttgtttttgtttagatttggagtttaagttgttgtttttttgggatttggttttttttttttgtttttttggtttatgtttgtttatttgtgtttgagtagtgtttttaattagtggtgttagttagtagatgtgtttgtggttgtttttaaatttttggatgtagttataggttttgatagttttagggaattggggttgagtttttgggttggggtttgtatttggatagaatttttgtttattttatttgtaggttttattgttgatggattttggggatagtgttaattttttttgttttgttgggaaatgtagttgtgattttgagttgggatagtggttgttttttgaaaaggtgggggagtattgagttgggaattaggttggggagtttagttatgattttggtttaatttgttgtgagattttggttaagttgtttaaatttttagagttttagtttttgtatttgtaaagttggaatttggggtgtagtgttttgatgaaagatgttggtggggagagtgaagatgttttttttgttgttagattttttagggtatttggtttatggttataaagtaggttatatttgataattttgttggattatttggaggatttgttgatttttgttgagttggtggtttgggatattgtgttatagaatttgaggtgtttgggtgtttttgttttgttaggtgtttagtggtttgtattgagagttaggagaggtttagattggattttgattttttgaggtgtgggagtttatggagtgtggtgggtgtggtgtttgggttgtgtagttaggtggggagtggtgtgtagttttagatttgtaggtaggtagtggtggattgtatttgttttgttttgtagtgttttttgtttgttgttttttgtttgtgtagttagagttgtgtgtggttaggaagggtttttgtttagtgtgttttggtgttttgtattttgagatgtagttattgttagtttgggtaggggtatatttgttttgttttttgtgatttgttgtgttgttttaagttgtgagaatatgtgtgttggaggagtttgttggttgtgggggaattttgggagtgggtttgttttggtgaagtgggtattttttttttagttttagatttgtagttttaattttgggattgggagaggttgtgagtaggagtgtggggataggtgttggaaatgtttaagtttttgttttttttttttgttttattgttttttagtgggtaggtgggattttgattattttagggtttgtgttttgttttgttttttttttttttgtttttatttttttgttgtttttgttgttgttttttttttgttttttttaatttattttttaattttttttttgttttttaatttttttttttgatgttttttttttttattgtttggttggtttttattgtttttgttgggttttttttgtttttagtttttttgattttttttattgttttattttgttgttttgggttttttgttttagtttagtttgttttttttatttttagtttttgtttagtttttttttttttttttgttttggttttgttttatgattttttagagattgagatgttgaggggaaagtttttttgggattttggtatttgagtgtttttttttgaagaatttgggtattggagagttttatgtttttttttgaaagattttttttagtttttttattgttttttgtggtatttgaggattggtatttgtgttttggttttgtttttatttttattttggagagttgtttttgtgttttgggaattttagatttttttttgtggttttggtattagaggtttttttttattatttatttttagtatttgggattttaatgttttgttttgtttttttggtggtggtgtttggttttttttggagttttgattttgggaaagggagtgggttttttttggttaatatttatttttagaagtagtaatagtagtaggtgtggtttgtttatggtgtggttggtggtatttgtttttattgtttgttttttgtggtagtgtttgatttttagtttggtttgttttgtggattgatggggttgtgttgtgttgtgttttagtgttttttttgtttgttggagttggttgtggtttggtttgttttggttgtgggtgggagaggttgggtgaagttagtgttgtggttttgtttttgttttgtttagtttgtttatttttggaattgtgtttgtttgttttgttgttttggggtgggaagtagaggtaaagggagggtgtgtggttttttgtattttgttgtgtttttttttgttttgttttttagagttttttatttattttgttttggtatttagtttttggtttgtgttattgtgtgtttgttttggatgttgtgggtttggggattagggtgtttttattgtggtttttgtttttttttggttgtggttt

SEQ ID NO: 260 - DNA, 2821 bp, Artificial Sequence
  chemically treated genomic DNA (Homo sapiens)
tttaggggataatatttaggtatgttaatggagtttaaaatgttaaggaaattatattataattttgtttagtatattataggttgttaaattgaaatgttatgttagttaggagtgtagtaatttttattttttggttttatttaattaggaagttttagtagagtgaagtttgttaagtgtttgttgttagaatttgaaggaatttgagtgagtaagaagagtgtttgatttattttatagaagtttgtttagaaatggaggagttagtgtttattgaagttggttttgtttttggtttgtttatatggagtttgattagttttagttatgtttattttggtttgggagatttgtaaagtgtttttttttttaatttttttgtattattttgaagtttagggaagtaaagagaggggtatatttggattgtaaaattaatgttttttgttgtttaggagagaagggaatgagagagagagagagatagatagatagagagagagagagagagagagagagagagagagagagagagagagaaattttattgaaatttagtttttttagaatttgtgtgatttggtttttaatgggagattagtgtgattttatggtatttttgttaggaattagtgatttttttgtagttattatttgatttattgtttttttgtttatttttttttataaagttattttttttttattttagtaagatttttttttttaatgatgataaagtttttgttttagtgttttttttaggattggtgtttttttaaaatagtgaatttagaaaattattttgtttaatattttttaaaatttttgtagttttaatgtaagtgtaagtatgtaaaggttttttgttatatttgtattttttgtttattttagaattattttttatttttgggtttgtaatagttttttttgtttttttggatagaggtgggtggtattaggggtttagggtagtaggaggtgaggggttgaggaggtgtgttagggtaggttggtttgtgttggatatgtgtgtttttttgtggagttaaagggttggggatgggggttttggatttattagagtaattttagttggtgggtgtttggtagttatttaaggaggtagggaaagtagtgagttttattgggtgggttatgatgagtagtatgatgggtagtagtagtagttagtaaaagtttttgtaaagtgtttagttgttgtattgttgtggggatttttatagtattatgattagtttgtgtaattttgtagtagtaaatggtttttgaggaatataggattgtgggggttgggtagtgggttattgagtattttgtggatggtggtagtagaggtggtggtggtggtagtggtatttggtggggaagtagtagttaaatttgtgtatgattttgagagttttagtaatatttagggattgggtttagttttggagtgagagggttgtttgttgagaagttgtgttggagatgtgggaagttgttgttataaggagggagttttgggaagttggaggataggaggagatgggagtttaggggtagatgagtggagtttgaggaggtagggtggagggagagttaaggtgttttgtagtttggtagttgttttttgagttttgttgtttgtatttttttggtgtttgggaagtagtaggtttttagtttgtttggggttatgtgggaagaggtagttgggttttgattggtggagtaggatgtaggttttgggagggaggggttgatgaggaggtgtaaggatgtaaggaggaggtggttgtggaagttatagatgggtttgtttgttaggtgttggtttgagtggggttaggtggggatggtttaaatgagaagtttgggttttagggtgggttatttgtatatttatatattatttgttttattttttgttttaggatgttttttattgaaggtggggtttggattagtgttttttttttgtgtgtgattttgggttgtgagtgtgggttgtggttgggtggtgtttttttgagttggagatggtgggggtggaggtgttagaggagtagtagtagtagggtagagaggggtgagttggtgtgggagagggtgttttgttggtgattggtgttttagtgtgtgggagtgtgttgtttaggttgtagggggatgtaggttgggaatgttgtggtggagaggttagggatgtttttttagggatttataggaaagagggtgagaggtgatggtgttagaattgtttttgttgatttggaagtaatagtagtattttttataagagtgtgtaattttaaggttgtttgttgaggtagtttagttattttggtaggtgttttttttttttttttttttttttttttttttttttaggttttttgtagttttgatttagtttaagtgtttgtaggtttgaatttttttttttattatttgtttttttttagtttgtagtttattagtgtgtttatttgggaggtgtggttagatgtgtttggaaggttagattggttgggataagtggtttgagagaaagagaaaggtttttttgtatatgttgtgggtgggttgttgggagtattggttgggtagtggtgtttgggaaggggagagtgggttttatttgttggtttaggtagtgattttgtgttttttatttgggtttttgttggatggttggtgatttggggtgatgagagaaggtttaatttggtaggagtttttggttttgtgtgttttttttattttttttagtgggaagggtaaatggtatagtgggatttgttttttg

SEQ ID NO: 261 - DNA, 2821 bp, Artificial Sequence
  chemically treated genomic DNA (Homo sapiens)
tggaaggtgggttttgttatgttgtttgttttttttgttggagagaatgaaagaaatgtgtagagttagagatttttgttgagttagatttttttttgttgttttaggttattggttatttggtaaagatttgagtaaggaatgtagggttattgtttgggttaataaatggagtttgtttttttttttttggatgttgttgtttggttgatgtttttggtaatttatttgtggtgtatgtagaggagttttttttttttttttagattatttgttttgattaatttgattttttaaatatatttgattgtattttttaggtggatatattaataggttatgggttggagaggagtgggtgatgaggagagggatttaaatttgtgaatgtttgggttgggttggagttgtggggggtttgggaggagagaggggagaagagagaaggaaggagagtgtttgttgggatggttgagttgttttggtgagtagttttggggttgtatgtttttgtgggagatgttgttgttgtttttaggttggtaagagtggttttaatattattgttttttatttttttttttgtaaatttttagagaaatgtttttggtttttttgttgtgatatttttagtttgtatttttttatagtttaggtggtgtgtttttgtatgttggagtgttggttgttagtaggatgtttttttttgtgttgatttgtttttttttgttttgttgttgttgtttttttgatatttttgtttttattatttttagtttggagagatgttatttagttgtggtttgtatttgtggtttggggttatgtgtggaagaggggtgttagtttggattttgtttttggtagggggtgttttggagtggagagtgaggtgaatggtatatgagtgtgtgggtagtttattttgaagtttgagttttttatttgagttatttttgtttagttttatttgggttagtgtttggtgagtgagtttatttgtggtttttgtggttgttttttttttgtatttttgtatttttttgttgattttttttttttgggatttgtattttgttttattaattagagtttgattgtttttttttatgtgattttgggtgggttgaggatttgttgttttttaaatgttagagggatgtgggtggtagagtttgagaggtggttgttgggttgtggggtgttttgattttttttttattttgtttttttgggttttatttgtttgtttttggatttttgtttttttttgttttttggttttttagagttttttttttatggtagtagttttttgtgtttttggtgtagttttttagtggatgatttttttgttttggggttgagtttagtttttggatgttgttgaaatttttgagattatgtgtgggtttggttgttgtttttttgttgggtgttattgttattgttgttgtttttgttgttgttgtttgtgggatgtttagtagtttgttgtttggtttttgtgattttgtgttttttggaagttgtttgttgttgtagagttgtatgaattagttatggtgttgtgggagtttttgtggtagtgtagtagttggatattttgtgagggtttttgttggttgttgttgttgtttgttatgttatttattgtagtttgtttggtgaagtttgttgttttttttatttttttaagtgattgttaaatgtttattggttggaattgttttggtaagtttagaatttttgtttttgattttttaattttgtagaagaatatgtgtatttagtatagattagtttattttagtgtgtttttttagttttttattttttattgttttagatttttaatattatttatttttatttagagaaataaggggaattgttgtaggtttgggggtgaggggtggttttgggatgggtagaaagtgtaggtgtagtaggaaatttttgtatgtttgtgtttatattggagttgtgaggattttgagaaatattaaatgggatggttttttgggtttattgttttgaaagagtattaattttaggggaaatattgaaatagaagttttgttattattaaagaaaaaagttttattaggatgaggaagaaataattttatgagaaagaatgagtgagaaagtaataaattaaatggtgattgtaggggaattgttgatttttggtaaaggtgttatgaggttgtattggttttttgttgaagattaggttatatagattttagaggagttgggttttaatagaatttttttttttttttttttttttttttttttttttttttttttttttttatttatttattttttttttttttttattttttttttttttaggtggtaaaagatattggttttgtagtttagatatgtttttttttttgtttttttaagttttaaggtagtataggggagttgagaaaaagaatattttgtgggttttttaggttggagtgggtatgattgaggttggttaggttttatgtaggtgagttgagggtggaattgattttagtgggtgttgatttttttatttttggataggtttttgtggagtgggttaggtattttttttgtttgtttgggtttttttagattttgatggtgaatgtttggtaggttttgttttgttgaagttttttaattaaatagggttagaggatgggagttgttgtatttttagttggtatagtattttggtttgatagtttgtagtatattgggtagaattgtggtgtaatttttttggtattttaaattttgttaatatgtttgggtattgttttttagg

SEQ ID NO: 262 - DNA, 2818 bp, Artificial Sequence
  chemically treated genomic DNA (Homo sapiens)
gaggtgggggtgttaatgataggtgtttagtaagtgtttttgaggtaattgttgggttgttttggatttggtgaatttttttggggtttagtaaaggtggatgttgattgggttaaggagtgggatttgtagtgttggattatttttttttaagtgtagaagtgttgtgtttgttggtttttaatagggtaagaggttttttttgttgtgtagagtgtagtgtttgtggtggggatagtagaggtgggatgggtgttatggagtttttgggtttttgtgtggttatttatttggttttagttatttgttgaaaaaggggtggatggttttttgggatttgagttgatattgtgtgtggtgttgtggggtaatttgaagttgtgtgtgtgtgtgtgtgtttatgtaggggtttatttagtggttatgggtttttgaagatttgggtgggaagtgtggtttgggaaagtgtaagtgtttttatggtaatgagggtggatggtgttagagtgagttgtttttggaagtgatgtgtggaaggggtgtttgggatgaagttatggttttggaggtggtgggagggttgttggaggaaatgttgttattgtggaaatggtaatgttgttaggtgatgtgtaggaggtgggggttgaggttgggtggttttttgtggattttttgagtttatagtttttaggttgtggaattggagttgttattgtttgagattttaaagtaaagtttagtttttggtgtggaagtggagggattttaggaattgtagtttgtggggtgggtgtggtttttgtttttggttagtttgtttggtttgtgtttgtgtgggtttttgttgtttgggtttttagggattgtggttttggtggtatgttttttgtttttttttgaagtgggagaagatttggtagaggtgttttgtttgttgtagttgtgtgggtggaggaggtagagtttgaggtgtgattttgattaagtttgatgtttttgtttttttagggagtaagtttggttgaaggtttatgttgtagattgggatattgaggtgtggtagtgagattttgtttttttgggtttgtagagggttgggggtgttgatgtgttttttgtgaaaggggatagtgtttgtgtttgtgtttttttggtggtgtttagtttttttgagtttgaggtaatttgggaggatgttgagtttgaggtgggttttttggtgggtttgggtgtgtggtttttgggatagggagtagtgtaagtgtagaatttggttttttgttttgtaggatgttattaatagtttggggagttggttgggtgtggtggtttatgtttgtaattttagtattttgggaggttgaggtgggggaattatttgaggttgggagtttgagattagtttgattaatatggagaaatttggtttttattaaaaatataaaattagatgggtgtggtggtatatatttgtaattttagttatttggaaggttgaggtgggagaattgtttgaatttgggaggtggaggttgtggtgagttaatattatgttattgtattttagttttggtaataagagtgaaattttattttaaaaaaaaaaaaaaaaaaaaaaagtttggggagttttggaagggaaaaaaaggtaaaaattaagggaattttgtgattattaagaattagtttatgagttttatttttaagtttgattgttattttgggttttttattttagtgatttgtttattatgtttttagttgtttaagttggagatttgtatttttttgggtttttttgttttttttgtgtttagttgtatattagtttgtttttattttgttttttaaatgttgttggaatttgtttttttgtttgttttttttttgttttttttttggttgtgttattattatttttgtgggtttttgagtagtatttttatgggtgttttggtttaaatgtttttttttagtggttttttttttatattgttagtagattaatttttttaaaaagtaagtattttttttaaaagtaataagttttttttttttttttttttttttttttttttttttttttttttttttttttttttttttttttgtttttttttttttttttttttttttttttattttgtgtttaggttgaagtgtagtggtataattttggtttattgttaagatttgattttaattttttggatttaagtgatttttttattttagtttgagtagttaggattataggtgtgagttattatatttggtttatttttttattttttgtagagataggattttattatgttgtttagggtggtttttagtttttgggtttaagggatttttttattttggtttttttaagtgttgagattataggtgggaattattatatttagtttataagtttttttagaatattgaagtgttttttttatgattttatggtgaataaagtttattttggttggtatggttttaaggtttgttatgatttgttttttgtgtaatttaatatgatgttggaggtttagtttttattattatttttagttttttttattttttatagtttattgtgagttttttatgtgtttgttatgttgtatttggtggtttgatttttgtagtaatgttttttttggaagggtttttatttggttaattattatttatttttttgggtttagtttagatatgatgttttttattaagtttttttttattttataagatgaggatttgttttttagtattatgttttagtttgtttgggttgttgtaatagaatattttagattgg

SEQ ID NO: 263 - DNA, 2818 bp, Artificial Sequence
  chemically treated genomic DNA (Homo sapiens)
ttagtttaaggtattttattatagtagtttaaatggattaagatatggtgttgagggataagtttttgttttgtgggatgagagggagtttagtggaggatgttatgtttaaattgagtttaaagagatgagtagtagttagttagatggaaatttttttagaagaaatattattgtaaaggttaggttgttaaatatagtgtagtaaatatgtgagggatttatagtgggttgtaggaggtgggaagaattgagaatagtggtgagggttgagtttttagtgttatattaaattatgtaggggataggttatgatgggttttgaagttatgttaattagagtgaattttatttattatgaggttatgagaagggtattttaatgttttaagaggatttgtgggttgggtgtggtggtttttatttgtaattttagtatttggggaggttaaggtaggaggattttttgagtttaggagttggagattattttgggtaatatagtgagattttgtttttataaaaaataaaaaaataagttgggtgtagtggtttatatttgtggttttagttatttaggttaaggtgggaggattatttgagtttaggaggttgagattagattttgatagtgagttaagattatgttattgtattttagtttgggtatagagtgggggaaggggaaaggaaggaaagagagatagagagaggaaggaagggaggaaggaaggaaggaaggaagggagggagggagggagggaggggatttgttgtttttgaggaaaatatttgttttttaggaaaattggtttgttggtagtatggaaaagaaattattgaggaggaatatttgagttagggtatttatgaaaatgttgtttaggaatttataggagtgatggtggtatagttagggaaggagtagaggggaaatagataaggggatagattttagtgatatttaagaggtagaataaaagtgagttagtgtgtaattggatgtgagaggaatggaggggtttaggaggatgtagatttttagtttgggtaattgggagtgtggtggataggttattgagatgaagaatttaagataataattagatttgaagataaagtttatgagttgatttttaatagttatagaatttttttaatttttgttttttttttttttttaagattttttagattttttttttttttttttttttttgagatggagttttgtttttgttgttgaggttggagtgtaatggtgtgatgttggtttattgtaatttttgttttttgggtttaagtgatttttttgttttagttttttgagtagttgggattataggtatatgttattatatttgtttaattttgtatttttagtagagattgggtttttttatgttggttaggttggttttgaatttttgattttaggtgatttttttgttttagttttttaaagtgttgggattgtaggtgtgagttattgtgtttggttaattttttagattattaatgatattttataaaatgagaagttgggttttatgtttgtattgttttttgttttggagattgtatgtttgagtttattgaggggtttgttttgagtttggtgtttttttaggttattttgagtttagggaagttgagtattattagggaagtataagtgtggatattgtttttttttatgaaggatatgttaatgtttttgattttttgtagatttgagaaggtggggttttgttgttatgttttggtgttttggtttatgatgtgggtttttagttgagtttgttttttaggaggatagaagtgttaaatttggttggggttatattttagattttgttttttttatttgtgtggttgtagtggatagagtgtttttgttgggtttttttttgttttaagggaaagtaagggatatattgttgaggttatagtttttaggagtttaggtggtggagatttgtgtaagtgtaggttagataaattggttggaagtgagaattgtgtttattttgtggattataatttttgagatttttttgtttttgtgttggaaattgggttttgttttggagttttgggtggtggtagttttgattttatagtttgaagattatgagtttggagggtttgtgaagggttgtttggttttggtttttgttttttgtgtgttgtttgatagtattattgtttttatagtgatagtgttttttttggtggtttttttgttgtttttagggttatggttttgttttgggtattttttttgtatgttatttttggaagtgatttgttttgatgttgtttgtttttgttgttatggagatgtttgtgtttttttgggttgtattttttatttgggtttttagaagtttgtggttgttgggtgagtttttgtgtgaatgtatatgtatgtatatggttttaggttgttttgtggtgttgtgtgtgatattggtttggattttgggaggttgtttgttttttttttagtggatagttgaggttaggtaagtgattgtgtgaggatttgggaattttgtgatgtttgttttgtttttgttgtttttgttgtaagtgttgtgttttgtatggtgagaggggttttttgttttgttgagagttggtgggtatggtatttttgtgtttggaaaagggtggtttagtattgtaggttttattttttggtttggttagtgtttgtttttgttgaattttgaaaggatttattaggtttaggatagtttggtagttgttttaggagtatttattgagtgtttgttgttgatgtttttatttt

SEQ ID NO: 264 - DNA, 2308 bp, Artificial Sequence
  chemically treated genomic DNA (Homo sapiens)
taagggttaagtaatgatgtataaatggggtttattgtttaaatttatagaaagtaaaatgtggaaaattagtaattttaattgatagtgtatatttaaagaatttatattggttgggtgtggtggtttatgtttgtaattttagtattttgggaggttgaggtgggaggattatttgaggttaagagattgagattagtttgattaatatggtgaaattttgtttttattgaaaatataaaaaaattagttaggtgtggtggtatatgtttgtagttttagttatttgggagggtgaggtaggagaattgtttgaatttaggagatagaggttgtagtgagttgagattgtgttattgtatttgtttgggagatagagtgagattttgttttaaaataaaaaataaataaaaagaatttatttaatagaattaagtattaatataataaatatgaagaattttagatttttggtttttaaaaaatatataaagatgatatttttttaaaatatttttataaaatatattgagattgtgatgttttatattgattgtatgaaaataatgaaaaagaattagtattgttttattataaaagttttattaatgtaaatttataaatttttttttaaatattttgagttaattttaattttatgatagaaatttattatttttagtaaaaatagttggtatttgggaaattaaaggtttaaaaattaagaatagtaattaaagaaatttgataaaatagtttttttaaaatttttatttatattataaggggaaattttgattatgtttttttttttttattaattgtagaatttaatattaaggattatataattttatatttttttttgagaaaaagtaaaggttttgtgttgtagtaataatgtaagatatggagggaagttttatttaagatttttttgtttgttttttttttaaagttattttagaatattagggagggttgagaggtaaggtatgaagggtgtaatatttaatatgagtaatgtgtgtgatgtatttggttaaaatgtatatagaggatttgtttttgtttttagatagaagttttttgttttgtagttatgagggttaattgttgaggttttatagttttttttttttttatatttggattgttatgttttttatttattattttgatgtagaggtagatttaggatttttgtatttgttaaggattttttggtaagtttatggggtgggagtggttataagatggagtttgtttggttttggtttttttggtttatataagtttgttttttttttaatttttaatttttatagttttttatttttttatttttgatttattttgtgttattgatgtttttggtttttgtttgtagtaagtttatttttattattattttttgtataaaagtttgtatttattaggttaaagaggggaattaatgtttgtaggaattgttttattgaattgtttggttgtgttttttgttagattttatttgttgttgtggattgtatataattatttttggtatgttttgtgtatgtattattttttttattttgttttttttttgtttaaatatgtgatttttttttgtttttgtttatgtttatttttgtttttttatttttttttaggaaggaggagggagttgggggtgttaaaagtgtagtgattttttttttttttttgtttttgtttttgtattttttgttataatgttttttgggttgttagtgttttgatgttttttgggaaaatagtttatttttttttttttttttttttttgtttttaattaattagttatttgttagagagggatatgtgtagtgagtgttttttgttttttttatttgaatttttttttttttttaagtagagagattttagtagtagtagtagttgatgatgaagagagaggtagtggtagagggggggtattttttatttttatttttaaagggataggatattaattttattttattttaattttgaatttaggggggtggggggaaggtggttgagtttttttttttattttttagttttgagttttgagagggggattgagtttgagagaggagaaggagtttttttttttttgaaaatttttatttatgatttttatttttttatttttttaatttgtttttttttttttattttttttttttttggttgtgagaggaggagagaaagaaattaaaagttttttagtaatatagattttttgttgttgttgttgttgttgttgttgttgttgttgttgttgttgttattgttg

SEQ ID NO: 265 - DNA, 2308 bp, Artificial Sequence
  chemically treated genomic DNA (Homo sapiens)
tagtagtagtagtagtagtagtaatagtagtagtagtagtaatagtagtagtaaagggtttgtgttgttaagaggtttttggttttttttttttttttttttatggttaaagaggaggagggtggagggagggaggtgagttggaggggtgagggggtaggagttgtggatgggggtttttgaagaagaagaaattttttttttttttttaggtttaattttttttttagggtttagggttggagggtgggggaaggaatttagttgttttttttttatttttttgaatttaaggttgaagtggggtagaattagtgttttgtttttttaaaaatagaaataaaaggtgttttttttttgttattgtttttttttttattattagttgttgttgttgttggggtttttttgtttgggggggagggggggtttgggtagaagagatgggaggtatttattgtgtatgtttttttttgatgggtggttggttggttgaaggtaggaggagggggaggggaggaaatgagttatttttttagaaggtgttgaggtgttagtgatttggaagatattgtagtgggaggtataggagtgggggtggggaggaggaggaagttgttatgtttttaatatttttagttttttttttttttttaagggaaagtggaggaatggaagtgggtgtggatggagatgaaaggaggttatgtgtttgggtgggagaggggtggggtgggagaggtagtgtgtgtgtggggtatgttgggagtggttgtgtatggtttgtagtggtaggtgaagtttagtagaggatgtggttaggtgatttggtgaagtgatttttgtaggtgttggtttttttttttgatttggtaaatgtaggtttttatgtgagaggtaatggtgggggtaaatttgttgtaaatgaaggttaggggtgttggtggtgtaaggtgaattgaaagtgggaggatggaaggttgtggagattgggaattgggaagggggtaggtttgtataggttgggaaggttaggattaggtgagttttgttttgtggttatttttgttttgtgagtttgttgaggaatttttgataagtgtagggattttgagtttatttttgtattggggtagtaggtgaggagtgtgatggtttgagtgtaagagagaagggaattgtgaagttttagtaattgatttttatgattgtaggatggaggatttttatttagggatagagataagttttttgtatgtattttgattagatgtattatatgtgttgtttatattggatattgtgttttttatgttttattttttaattttttttggtattttggagtggttttggggaaggagtaggtagggaagttttgagtggagtttttttttatgttttgtgttgttgttataatataaagtttttgtttttttttggagagggatgtgggattgtgtagtttttaatgttgagttttatgattgatgaaggagaagggatgtgattaaagtttttttttatagtgtagatgagagttttaaaaggattgttttgttaagtttttttggttattatttttagtttttgagtttttggttttttaaatgttagttgtttttgttgaaaataatgaatttttattataaaattagaattaatttaaaatatttaagaaaggatttataaatttatattagtaaagtttttatagtgaaatagtgttggtttttttttattgtttttatataattaatataaagtattatagttttaatatgttttgtaaagatattttgaaggaatattatttttgtatgttttttaaaaattaagaatttaaaattttttgtatttattatgttggtatttaattttgttgggtgggttttttttgtttgttttttgttttgagatggagttttgttttgttttttagatgagtgtagtggtgtgattttggtttattgtaatttttgttttttgggtttaagtagtttttttgttttatttttttgagtagttgaaattataggtatgtgttattatgtttggttaatttttttgtgtttttagtagggatggggttttattatgttggttaggttggttttgattttttgattttaaatgatttttttgttttggttttttaaagtgttgggattataggtgtgagttattgtgtttggttggtgtaggttttttaggtgtatattattagttaaagttattaattttttatgttttgttttttgtaagtttgggtagtggattttgtttatgtattattgtttagttttta

SEQ ID NO: 266 - DNA, 2441 bp, Artificial Sequence
  chemically treated genomic DNA (Homo sapiens)
ttgatatggttttgatgttagaggagaaatatggtttgggggtttttgttaatttaggttttttaggtttttattattgtggggtttttggtattatgttttttagtatttttgatgttggttttgatttggaaatgttgtgtgtgtttaggtttttggtggagagagaagtagtttttgagggatttgtttttgagagggttttatttagggagtgattgatgtttaggtgtggttaggtttattgttttttgtttttgtttttttttgtttgtgttttggtggttgaggatttagtaggtttttttatgtttgttttttttatgttgagtgagttgggtggttggggtttgaggtgtgattaggtagttttgatttttatatgttttagaagggttggtatttagttagggagttgttgttttttttgtatggagtaaaagtaaatgtttttttttatttgttaggtttttgttggagttttttttatgtagtgatagaaagagttattgtgggtgttttttttagtgagtgtttaaagatgatggtggggtgggtgggtttggggttgatttttttttttagtttttttgaggggtttatggttggtgataagtgagtggtggtgtttgggtattggttggttgggggattttgattagtgtggttttaggatttttattttgtatttagtttgtattaggtagtgtttagttgtttttatgtttattttggttaaatttgttgttttaggtgatttagattgtggggggataggtaatggggatgagattgggttttatagtttttttattgtagtagtatagtttttgggagttgttgagatgtatatatggtttatttagatttgagttaatttttatttaggatagttttgagatttatgttttttggaagtttgtgaagttttgtgttatggtgtggtaagaggatagttagttagatttgtttagtttattttagggttgtgtgggggtggtagttgtaaaatatatgatttttattttgatagtgtttttttaaaaaattaaagttgtattttgtttttttggttagtaagaaatttaaaagggaaatagtaagtgtttggttttttggttatgtttttttgtttttgtttttatttttaaatttatgataagtaggggagattgtttttgttttaggttagtgtttgatttatataatttgttagttttatttgtttagttttggtttttttgtttagggagtttgtggaattggaaaagtttttggtttgtgggtgaaatgttaggtgtgttggttttgttgttttttttttagttttgtttttgttttgtgtggtttttgtgttgtttttttttttttttttgttggtagtggaatggatgttgtaggtggaattaatgttgttgttgtgttttgtaattgtgttttgtgtatgttttttggttttgtgttttgtttttttattttgtgggtttgagttttttgggttgagttttttggtttttttgggttttttttgtgttttagggagtaggtagggggattagtatataattatttggagtttttgtggtttaggtagatttagttgaaattttgtgtgtgttggtgtagaaggtggaggttattttggagttatttggattgtgtttttttttttagaggggtgaggggattttgtgtggttatttatttttaatttggaggtaggtatgggagtaaatgtggggtatatagaggtttagaaaagtattttgggtttattgtttgggttgtgtttgtttttttattttttttttatttttttgtggtttttaggtattttgtatttattttattttttttttttttttaggagtttggttaggtaggttggggttttttgaaaggagtattgatgagtgttgtgttttttaatttggttttgtggggatagagtaggggtttttgtagtttgatttttgttttttagaatttgggtatttttttttttttttagttttgttgattttgtttgtttttagtgagggaagaatagtggtttttagttagggtgtttgttagaattatttggagtaggttagtttttagaggtttgggtagggtatagtttttaatagtttagttttttttggtttaggatgtttttgattgtgttttttgtttttggtatggttttgttttgtttttgtttttagtttttgtttgttattaattttttattttttatttggggttaggtgggattgaaagttagggaggggttggttgaggttagggttggggtggtttttggtagatgtttttgtgtttgttattttaggtattagtgtgggtatttgggtatttagttttgtgttggagttgatggttgaggtagggagggtattggtgttgttagggagtttttggttattttttgagggtgg

SEQ ID NO: 267 - DNA, 2441 bp, Artificial Sequence
  chemically treated genomic DNA (Homo sapiens)
ttatttttagagggtggttaagagttttttggtagtattgatgttttttttgttttagttattagttttagtatggggttggatgtttaaatgtttatgttggtgtttgggatgatgggtatgagggtatttgttaagaattgttttagttttggttttaattagtttttttttggtttttagttttgtttggttttaggtggagagtgaagggttagtgatagataggagttgggagtgggggtagagtaaagttatgttagaggtgagagatatggttaggggtgttttggattagggagagttgagttgttgggagttgtgttttgtttgggtttttgggggttgatttgttttaggtggttttaatgggtattttggttaagagttattgttttttttttattgggagtagatagaattaataaggttgaggaagaaggaaaatgtttaggttttggggaatggaagttagattgtgggggtttttgttttgtttttataaaattaggttgaggggtataatgtttgttagtgttttttttgggagattttggtttgtttgattgagtttttggaaggaaggggaaagtgagatgggtgtgggatgtttggagattatggggaggtgggggagaaatgggggagtgggtatggtttgggtaatgagtttgggatgtttttttggatttttgtgtattttatatttgtttttatatttgtttttaagttaagggtaaataattatatagaatttttttatttttttagaaaggaaaatatggtttgggtggttttggagtggtttttattttttatattaatgtatatagggttttggttgggtttgtttgggttatggaggttttaggtggttgtgtgttggtttttttgtttgttttttggggtataagggaagtttaaggaaattaaaaagtttagtttaaggagtttgaatttgtagggtaaaggagtgggatatggggttaagaagtatgtgtggggtgtgattgtaaaatgtagtagtgatgttagttttgtttgtaatgtttattttattgttagtaagaaaaaaaagggaaatggtatgggggttatgtggggtggaggtaaagttgaggggagggtggtggggttagtgtatttggtgttttgtttatggattgagagtttttttggttttataaattttttgggtagggaggttgggattgggtaagtggagttgatgggttatatgaattagatattagtttggggtggaaatgattttttttatttgttgtgggtttaaaaatgagggtgggggtaaaaaaatgtagttggaggattagatatttattgttttttttttaggttttttgttggttagggaggtggggtgtggttttgattttttaaagggatattgttaagataaaaattatatgttttataattattatttttatgtggttttggagtgggttggataggtttgattggttgtttttttgttatattgtggtgtagaattttataagtttttgggggatgtgaattttgggattgttttaagtgagggttgatttgggtttgggtgggttatgtgtgtgttttggtagtttttgggagttgtgttgttgtagtggggaggttgtggagtttaattttatttttattgtttgtttttttgtagtttgggttatttggggtaatagatttggttaaggtggatgtgagggtagttgaatgttgtttaatgtaggttgggtgtagggtggagattttgaagttatattggttaaagttttttagttagttggtgtttaggtattgttgtttatttattattaattatgaattttttaagagggttggggagaagagttagttttagatttatttattttattattatttttaggtatttgttggagagaatatttatggtggttttttttgttattatgtggaaggggttttaataggaatttggtaggtgaggaggagtgtttgtttttgttttatgtagagaggatggtggttttttggttgggtgttagtttttttggggtatgtggaggttagagttgtttggttatattttggattttggttgtttagtttatttagtataagagggataaatatggagggatttattggatttttagttattagaatataaatagggaggggtaaaaataagggataataaatttagttatgtttgagtattgattattttttaggtgaaatttttttagaggtaaattttttaggggttgtttttttttttattaaaaatttgagtatatgtagtgtttttgaattaaagttaatattaaaagtgttggagagtgtggtgttaggagttttatgatggtaggggtttagagggtttgggttgatagggatttttaagttatgttttttttttagtattaagattatgttag

SEQ ID NO: 268 - DNA, 2818 bp, Artificial Sequence; identical to SEQ ID NO: 262
  chemically treated genomic DNA (Homo sapiens)

SEQ ID NO: 269 - DNA, 2818 bp, Artificial Sequence; identical to SEQ ID NO: 263
  chemically treated genomic DNA (Homo sapiens)

SEQ ID NO: 270 - DNA, 2476 bp, Artificial Sequence
  chemically treated genomic DNA (Homo sapiens)
aattattaggaggttgggggaaaagaggggaaaaatgggtaaggaaggttgtaaatgttaagatgttaaataggaatttaattgaagtttgaagtgaaatatagttttttttggtttaattgttatgtaaataatttttaagtatttttagatgtaaagaaaaatagttattgtgtataggtgttagttgaatgtttgagagttggatgaatggggaagatttgttatatatttagtggtgggtggattttattaggttgtagtttttatatagtttttttttgttgtattgtagaggtgttattttttttgttttaatttttatttaatttgatttttttatttgtattttaaaaaaaagattttttggattttttttagtattttgtgtttttaggggaattaaattagagtttttagagttgttagggaagaggttgtgttttaattagataaatgtttttttggatgtataggatagagtttgtgtttttttattatttgttattgttttttttagatgtatattttattttttgttttattttttttttgttaaggattttatagtttagtatagaattaagttttggaggtgatttgagggtgggaagtagaggggttttgaggttttgttagaagttttggtagtgtttttgtttttttttaggtggatgtgtagttttgggaagggagttgggtgggagttttggtggtgtattgagattaatgtggtttggtttatggtgagggtggggtgttgtggtttttgtttttgtggattttttgttttttagatagagtttagggtgtgagtgaatttttgggatgtttagatttggggaaggtgtggggtggttatgggtttttgattttttttattttttgtaagttatataaaagggagatgtggatatgtataaagtttgtttgtggaaggtggtgtgtgattttgatgttggtttgggttagggttgtatttaggttgttgttgttagtagttgtgaaaagaggttggagtaaggaagggggatgggggtgagagaggaaggtgaaatgaggtggagaatgtagggaaaagtgaggggtttttagttttttgggttgttttgattttttttttttttttttagggtttaagagaaaggaaagggtaatgatttaagagtgaaggattggttttagggatgttgtgtttttggttttttttatgtgttttttttttttttttttttgtttgaatgttttttgttttttttgatttttgtttttaaggtagggattaagttggggtttgggtttagggttgttttttattttttttgttttgggttggtgtggaattagggagattagtgttttgtttgtttttttttagtgggttggagtgtgattttttggggtagggttgggttgaaagtggggatgtgttggatgtttgtaagtgggggtggagaggagaggggttttattgatggatttttggtttttttgtattaaagatttgggttaaggttttggggggtattgtgtttttattgtgtagtttttttttgttttttgaggtgtggtatttatttttagtgtttgagttgtttaggtggttagtaggagtagtgttaaattgggtagtattgtgattttgtgtggggtattgagtgtgttgttgtgtgagtgggatttgttgtgtttttgttttgtttgtgttgttattgttgttgttttttggggtttttgtgtatgtttttttgtgtgtttttgtttattgttgttgaggaaattgatggagtttgagtgtggtggtggggtttagagttaggtgagttagttgatttggtttattttgtttggtatttgagagagatttttagtggtgttgttggggaattgtgtttgtttgtgttgggaggggtttttgtgttttgtgtttataggtgtatgtgtttttggtgttgtttgtattttatgtgttttttttgttttttggttgatggtttatttgggttttgtgaatagtgggagggagagtttggggttaggagagggatggtgtaggattagggaaaggtgagttttaggatgttgaggttttagaaaagttgagagtgtttttgtttgtttttgtgagtttgaattatttgattttgtaggttttttgggggtgttgtataaaggattgttgttagggtgtgtttttatttgtattttgtttttttttttggtttggagaggtggggtaggtgtttttggaagagaatgagaatgagtgaagtttaaaggaaataggattttttttgtttgttgagatagtaaaattttattttttaatttttaatgttaaaagtaggtatgagtaatttggaatttttatttttagaatgaattaaaggagtaaggtgtaggatttggtaaagaagtggttaatttatttatttttttttgaaagtagggttttgggtttgggttttgttttttt

SEQ ID NO: 271 - DNA, 2476 bp, Artificial Sequence
  chemically treated genomic DNA (Homo sapiens)
aaagaaataaaatttaagtttagaattttgtttttaagaagaagtaaatgggttggttgtttttttgttaggttttgtgttttgtttttttggtttgttttaaagatagaaattttaggttgtttgtgtttgtttttgatgttgggggttaaaaaatgaggttttgttgttttaataagtaaagaaaattttattttttttaagttttatttgtttttatttttttttagaaatgtttgttttatttttttaaattgagagaaaaaatgaaatgtggataaaaatgtattttagtagtagttttttatatgatatttttgggaggtttgtggggttggatgatttaagtttatggggatgagtaggagtgtttttgatttttttagagttttagtgttttaggatttatttttttttgattttgtattgttttttttttggttttagatttttttttttattgtttatgaagtttaggtgggttgttggttggggagtggagggggtgtgtggggtgtaggtggtgttaagggtgtgtgtatttgtgggtgtggggtgtgagggttttttttggtgtgagtgggtgtagttttttggtggtgttgttaggggttttttttgggtgttgagtggggtgggttggattagttgatttgtttggttttgagttttgttgttgtgtttgggttttgttagtttttttggtagtggtaggtgagagtatgtggaggagtgtgtgtgggggttttgggagatggtggtggtggtggtgtgggtagagtaaggatgtggtggattttatttgtatagtagtgtatttggtgttttgtgtagggttgtgatgttgtttggtttggtattgtttttgttggttgtttggatggtttgggtgttggaggtgggtgttgtgttttggaaggtggggggaggttgtatggtggggatgtgatattttttaagattttaatttaagtttttaatgtagagaagttgggggtttgttaatgggattttttttttttttgtttttgtttgtggatgtttagtgtatttttgtttttggtttagttttgttttagggagttgtgttttggtttgttgagagggagtgggtgaggtgttggtttttttggttttgtgttagtttggggtgagaagggtagggggtgattttgagtttagattttgatttagtttttgttttggaagtgggggttgggggaggtgagagatatttagataggggggaagggggaaggagtatgtggggaaaattgaaaatgtagtgtttttaaagttagttttttgtttttgaattgttgttttttttttttttttgggttttggggaggaggaggaggagttgggatagtttaggaagttaggagttttttgtttttttttgtgttttttgttttgttttattttttttttttatttttattttttttttttgttttaatttttttttgtggttgttggtggtggtagtttgggtgtgattttagtttgagttggtgttggggttgtgtattgttttttataggtaaattttgtgtatgtttgtgttttttttttgtgtaatttgtgagaaatgggaggggttggagatttatagttattttgtgttttttttaagtttggatgttttgggagtttgtttgtattttaagttttgtttgagaggtagaaggtttgtgggaataaaagttgtgatattttgtttttgttgtgggttgagttgtgttagttttagtgtgttattgaggtttttgtttggttttttttttggggttgtgtgtttgtttgggagggggtagagatgttgttggggtttttggtggagttttggggtttttttgttttttatttttggattatttttgaggtttaattttgtgttgggttgtaaagtttttggtggggaggaaataaggtggagagtgggatgtgtgtttggaaagggtagtggtggatggtggggaggtatgggttttgttttgtgtatttaaggaggtgtttgtttgattaaggtgtggttttttttttggtagttttggggattttggtttagtttttttgggggtataggatgttggggagggtttgaagggttttttttttagggtgtagataaaaggattgaattgagtgaagattaagatggagaagatggtgtttttgtagtgtagtaaagaaaagttgtgtggaggttgtagtttagtgaaatttatttattattaggtgtataataagttttttttatttatttaatttttgaatatttagttaatgtttgtgtataatgattgtttttttttatatttgaagatgtttagaagttgtttgtatgatagttgggttagaggaggttgtattttattttggattttggttgggtttttgtttggtattttaatatttgtaattttttttatttgttttttttttttttttttttagttttttagtaatt

SEQ ID NO: 272 - DNA, 2265 bp, Artificial Sequence
  chemically treated genomic DNA (Homo sapiens)
tatttttatttagtgtgtttagggtatttgtattgtgttagtttgtggtggtttttaaattaattttgattgagtttttgaggtagttttttatttttatttgtattaatttagtatgtttattaaaatttttaagtaattttttttttgttatgtaaatgttaggagttgtttgatttttttttttttttatttttattttttttttagtttagttggttttttggttgggtaagttgggaatttagtgattgaagggttttggaaggtgttggaggggagagatgttagtttgaatttttatagggtttttttattaaaaatttttaaaatgttggtttgagaaattttttttgttggagggtttgagttttatttttttttgttgtgtgtgtttttattgttgtgaattgttgtgatttttaatttattattttattttgtgtttttagtgttttagttgttttgtatttgtttagttttttttttgtttatgtatttggttggttggtggtgtttgggatgtggttgtaggtgttgttgtattggtggtaggagttagtgtagttatagttggtataagttttggttgggtagtttttggtggagttgtttatgttgtgatattgatattggtaggggttgagagttttgttataggaagttgaggtaggagagtagtagttgtgtggggttttttttgtagggttgtagtagttagaattggtagttgaagatttgggtaaagttggtgatttttgagatggatggtgtatagttgtggatgtttggaatggagtttggaagttgttggattggatgttggggatttttttgttaaatatttttgttattgtttatgggtggtggtagtggttgtttttgttgttgtggtggtggtagttgttttagttggttgtggggttgttttggtttaagtagatatggttgtgggagtgagggaggaggaggaagaggaggaggagagaaggaggaggtggtggttgtggtgaggaggagattgggagttgtgaagtttttgtttttggttggttgattgttggttgaggtgtagtatagttttggttaaatttttaattgtgtgtttatgtatagtggggtggatttggttttattggttagggttttgggagtaatagtaatattttaatttgtttaattagttttagtataataaagtattgtttaaaaagggggtggggggtattgagggggtgtgtgtgtttgtgtgtgtgtgtgtttgtgtgtttgtgtgtgtttttgtttgttgtggagtggggaggggttttagtttatttgtttttagtaaattttaaagatattgtagaagttatagtataaggttttgtgatgtttggggataatgtgttttaattagaagttttaaaagtgtatatgttttgggaatgaggtgggtgattatttttttttgttttttattattttgtttttgtgggttgtattaaaggtgagtgtagaattaaatattgatattgaaatagggagttaaggtgtagggagtggggagtggggggatgtaggatggaggtaagaaggaagggaaatagtattttttttttttttagtggagtgttgggaagtaagttgtaatttatatgttttgaaaatttgttttttggggaaagaggtaattttttttgtaggagatgagtattttttggatgtgggttggataggaatgtttaagaaggtataatgtttattaagttggtgaatggtagggagagtttttgtagtttaaagtttttataatgatttttaaaaattattgttttaaatatatataatttaaggaagtttaaatttttgttgttggtttgtaaaaagagttaaatagttttatttttgtttaatatttttatttatttttaagatattggaataaaggttttttaattatgtttagtggttaaagatttttgtaaaggtgaatggatttatgtataatttgttatatttttaggaaagaatgggaaagttttggaagtggggaaggagataaggattaaagtttttgtaaagttagatgatgtttattgattttttttttttggttttatgaatgtggtttagtttttttattttttagatttgggtttttgtatttttttttttttattttttgttgtaaagatattttatttagtttgtatgtaagggaagaaaggatttaagaattatttagttgatatatgagatttaaattttgttttttaggaggtg

SEQ ID NO: 273 - DNA, 2265 bp, Artificial Sequence
  chemically treated genomic DNA (Homo sapiens)
tattttttgaagagtaaagtttagattttgtgtattaattgaatgatttttgaattttttttttttttgtatatgagttaagtaggatgtttttgtagtaggaaataaaggggagagggtatagaaatttgggtttgggaaatggagagattgggttatatttatggagttaggagggggaaattaatgagtattatttgattttgtaaaggttttgatttttgtttttttttttatttttgagatttttttatttttttttggaggtatggtaggttatatatggatttatttatttttgtgggagtttttggttattgaatatagttaaagagtttttattttaatgttttgaaaatagatgaaaatattaaatagaagtggagttgtttggttttttttgtaagttagtaatgaggatttgggtttttttaagttatatgtgtttaagatagtaatttttaaaagttattataaggattttgggttgtaggaattttttttgttatttattggtttaatggatattgtgtttttttgggtatttttgtttagtttgtgtttgggagatatttattttttgtaaaggaagttgtttttttttttaaagagtaaatttttaaaatatgtaagttataatttgttttttaatattttattaaaaaaaaaaaaaatgttgtttttttttttttttgtttttattttatatttttttgttttttattttttgtattttgattttttattttagtattagtgtttaattttatatttgtttttggtgtagtttatgggggtggggtagtgggaagtaaggaaagatggttgtttattttatttttaaaatatgtgtatttttgaggtttttgattggaatatattgtttttagatattatagagttttgtgttgtggtttttgtgatgtttttggaatttattaaaaatagatagattaagatttttttttattttataataagtaaaaatatatataagtgtgtgggtgtgtatatatataaatatatatatttttttagtattttttattttttttttaagtaatgttttgttgtgttaaaattagttggatgagttagggtgttattgttgtttttgaggttttggttaatagaattagatttattttgttgtgtgtaagtgtgtaattaaggatttaattaaggttgtgttgtgttttagttagtagttagttggttggagatagagattttatgatttttagttttttttttgttgtggttgttgttttttttttttttttttttttttttttttttttttttttgtttttatagttatgtttgtttagattagagtagttttatagttaattagggtagttgttgttgttataatagtaaggatagttgttgttgttgtttgtgagtgatgataggagtgtttgatagaagggtttttagtatttgatttggtgatttttaagttttgttttagatgtttgtagttatgtattatttgttttaggaattgttaattttgtttgagtttttagttattgattttgattattatagttttatggggggagttttgtatggttattgtttttttattttggttttttatggtaaagtttttaatttttattagtattagtattatggtgtgaatggttttgttgggagttatttagttaaagtttatgttgattatagttatgttagtttttattattagtatggtggtgtttataattgtgttttaagtgttattaattagttaggtatatggatagggggaaggttgggtagatatagggtgattaggatgttgggggtgtgagatggggtggtagattgggggttatagtggtttatggtagtgggggtgtatgtggtagaagggagtaggatttagattttttaataaagagagttttttgggttagtattttagggatttttagtaggagagttttgtggaggtttgaattagtgttttttttttttggtattttttaaggttttttagttgttgaatttttagtttgtttggttaggaagttggttaggttggaaaggggataggggtggagagaagaaagaattaagtagtttttggtgtttgtgtaataaagagaaggttatttgggaattttggtaagtgtgttgggttggtgtgagtgggaatagaaggttgttttaaaaatttagttaggattagtttgagagttgttataagttagtatggtgtgggtgttttgagtatgttgggtgggggtg

SEQ ID NO: 274 - DNA, 2368 bp, Artificial Sequence
  chemically treated genomic DNA (Homo sapiens)
aatgtgtatattttatttgtattttgatttaaataaattgttaaaaaaaattataatataattgggtatttgaatatagattagatataaaatgatattaaggaattgtgaattattaaatgtgataatagtattgtggttatatgttaaaaagaagaaaatttttattttgtagatatatattttgaaatatttatgtttaaagtgatattatgtttagaatttgttttagaaataattttaaggttgggaagtgggtaagataaagatgaaataagattggttatgagttgttaattgtggaatttgagtgaggattagtatatggggtttgtattatattattttatttttttaaatgtttgaaattttttattaaagttaagataaagttaaattataaagattgttttttaaataaaaaaggggttgggtgtttatgtttgtaattttagtattttgggaggttgaggtgggtggattatgaggttaggaaatttagattattttggttaatatggtgaaattttgtttttattaaaaatataaaaaattagttgggtgtggtggtgggtgtttgtagttttagttatttgggaggttgaggtaggagaatggtgtgagtttgggaggtggagtttgtagtgagttgagattgtgttattgtattttagtttgggtgatagagtgagattttgttttattttttaaaaaaaggaatagaatagaaaggtattaagaagaattagaaaaaaaatttattgtttttgatttattttttgtttttttttaaatgttttggtgtggagaaaaggatgagtattggtaataagtattatagtttgttattggggtgggtgggattgatgttttttttatttaaatttttgatattttgtttattataaatttttttgtaataattgttttttaaaatgttgtattaaaatgttattttttttgattgttgaggaattttgtatttttttaaattttgtgtttgtgttttggttgggagatgtggggaaaattttgggagtttaggatagggagaggtaagtttttatagaagtgggaatggttaatagttttttgagaagatagttttttttttggggaggtagaggaagttttaagaatatataaagataggagagtggaagggttggttagtttggagatattaaaagagattttggatgaggataggggttgatttgaaagttttgtttgattttgggttgtaggagggggtgtgggatgggggtggagttgttggtgatgataatagttttatgtgattggttaatattgagtgttgttttgttttggtgttagagttgttgtggtttgttttatttttggtggtggtatttgtttttggtggttttgaggatgtgtgggttaggggtggttttgaaattaggaagtggagggggagtaggtaaggaatttggtggggggtttttggggttggtgtgagggagtggttttggtttgtggatgtttattttgggggagttgtgtggagaagtaattggtttgtgatgtagtttttgggttttgtggtgggtttgtgagttttttttgagtggagaggtgtttggtttggagggagttggtggttttggggttatgattttttggaaatatttgtttatgttattagtgtaagtttttttgatatttttgttttgtattttttggtgtagaaaatggtggttagtttgtggggtggggtggttgaggtggggggtgagggtggtgaggagggttagggttagggttagggttagggttttggggtggggtgggggaggggttggatggtggtagtttttagttagtgttttgttgtagtagtttttattttttttattttggtagtttgtaggtttgtggggttaagtgttgtggtggtgtattttgtgttaagaatttggaggaggagattgtaaggataggtttaggttggtgtgagggttggtggtgaggtgggggttggaatgtgaggaaagtttagtttgagattttaatttatgtttttatttttgtttttttttattttatgtaatttttttttttttatatgttatttttgttttttattttgttgtttgtggaagtttggagatggatttatagggaaaatggtgggttttgtggaagggaggggtttggattgagggtattttatagggtatattggttttttaggtggaaaaaaatgaaatgttagagtataaagttaagtttagggttttgaattttaaaaggtgtttagtagggtttttgtttttagtgtttattagtttattaagaatttagtttatttttttttttttgttttttaggagtaatggagttt

SEQ ID NO: 275 - DNA, 2368 bp, Artificial Sequence
  chemically treated genomic DNA (Homo sapiens)
ggattttattatttttaggagataagagagagaaaatgggttgaatttttggtggattgataagtattgaggatagaggttttattaggtattttttaaaatttagagttttggatttgattttatattttaatattttatttttttttatttgagaagttagtatgttttgtggggtgtttttaatttgagttttttttttttgtaaagtttattattttttttgtagatttatttttaggtttttgtaggtagtaaaatggaggatgaggatggtgtgtgggaaggggagggttgtatggggtagaggggggtgagggtgaaggtatggattagggttttagattgggttttttttatgttttggtttttgttttattattgatttttgtattgatttgggtttatttttgtagtttttttttttggatttttgatgtgaggtgtgttgttgtgatatttagttttgtagatttgtagattgttggggtgggggaagtgggggttgttgtagtagaatgttagttaggaattattgttatttggttttttttttgttttgttttgaggttttggttttggttttggttttggttttttttgttatttttgttttttgttttagttgttttgttttgtaagttgattattattttttgtattaagaagtgtggggtaggggtgttggaaaagtttgtgttgatggtgtaggtaggtgtttttgaagggttgtagttttaggattgttggttttttttgggttgggtatttttttgtttaaggaaggtttgtgggtttgttgtggggtttgggggttgtattgtggattgattgtttttttgtatggtttttttggggtgggtatttgtaggttggagttatttttttatattaattttagggattttttgttgggttttttatttgttttttttttgttttttaattttggggttgtttttggtttatatgtttttagggttattgggagtaggtattattgttgagaatggaatgagttatgatggttttgatgttagagtgagataatatttagtgttggttggttatgtggggttgttgttattgttaatggttttgtttttgttttatgtttttttttgtagtttggagttaggtggggtttttgggttagtttttatttttatttggagttttttttagtatttttagattggttggtttttttatttttttgtttttgtgtatttttgggattttttttgtttttttaagagggaagttgtttttttagggagttgttggttatttttatttttgtggggatttgtttttttttgttttgggtttttaggattttttttatattttttaattaggatgtgggtgtagaatttaaaggggtgtaaaattttttagtagttaagaaaaataatattttaatgtaatattttaaaaaataattattgtaagaaaatttatgatgagtaagatgttaaaaatttaaataaagagagtattagttttgtttattttaatggtaaattgtggtatttgttattaatgtttatttttttttttatattagaatgtttggggggggataggaaatgagttaaggatagtggattttttttttaattttttttaatatttttttgttttgtttttttttttggggggtggggtagagttttgttttgttgtttaggttggagtgtagtggtgtgattttggtttattgtaagttttgttttttgggtttatgttatttttttgttttagttttttgagtagttgggattataggtgtttgttattatgtttggttaattttttgtatttttagtagagatggggttttattgtgttagttaggatggtttggattttttgattttgtgatttgtttgttttggttttttaaagtgttgggattataggtgtgagtgtttggttttttttttgtttaagaaatagtttttatagtttaattttattttaattttaatggaaaattttgaatatttggaaaaatggaatagtataatgtaaattttatgtattagtttttatttagattttatagttaataatttatggttaattttattttgtttttattttatttgttttttaattttaaaattatttttgaagtaaattttagatataatattattttaggtataaatattttaaagtatgtatttataagataagggtttttttttttttagtatataattataatattgttgttatatttaataatttataattttttaatattattttatgtttaatttgtgtttaaatatttaattgtattatagttttttttaatagtttgtttgaattaagatataaataagatatgtgtatt

SEQ ID NO: 276 - DNA, 3650 bp, Artificial Sequence
  chemically treated genomic DNA (Homo sapiens)
attgtatttttggttttatagttttttattgttgattttaggtttttttggattttaggtttttttttttaagatgtattttagaggattaaaaatatattttatttgggttttgtttgtttttgtggaagggtagtttattagaggatataattttgtgttttaatttgtttttttttttaaaggaaatgtggagaaaaaaaaaaagtagaaattggaaataattaatatttagtttattttatttgatttttaggggaattggtgaggagtttaagatgattttttttttttagagaaagaatttaaagtttagggaaatagtgataggggagtttaagattgtttttgttagtttttttttggttattttttgttgtgattgtaggatagtttttattagtaggagaattgggtaagtgtgtggataagtagagagtgtgttgaataatttgtaatgttttatgaaatatgtattgttatggttttttaaaaggttttgtggaagttgtttgtttttattaattaagtttttatttatataaaagtagaagtagaagtagttttagaaaatatattaataattttttatttttttgaagattagagtagtagaaaataggtgatttgtattataaaattgtatttatttttttttttttttagattttatattatattagtttatttgtgttatggtgtataaaaaatggaataggtgtttttattatattgtttttttttaaaaatagattatttatattttaattttgttttttttaaatttgatttttaataggagagttttttattattttagatggagtgaggttgtatgattgggatggaagaaaggaattttttaaatttgggggaatttttgttttttgttttaagattattttatttggggtgtgggggtgggtgtggtggttagggtagtggaatgtagttgtggttgtgttatttttgtatttttaggtgtgtgggagggattggtggggatgtgagttgtggattttggtgaatttgggggaggtagatagggggaggtggatatttagttggtaggtgttttagtttttttgtagttggtgggttttttttttgatagttttaggaaaggtagattttttttttagttagttaggtaaggtaaagattgttgttgagtttgttgttattgagggtgtatagattttggggagattgaagtttgttattgtgggattttgtggggtaatttgggtttatggaagttttttgaaagaggggagaagggtttgtattttttttatggaggatttttttttttttagtattttgtttgatgtatttaattggtagaagtgagattttaataggtagtagagagtgtttatgtggaggaggtttggggtgttgtggtgttatttttatttttttttgggattgtgtttatttttaaagttatatgttgatgaattaatttatgttttaaatttttttttttagttttgtgagtttgtggtgatattgggttgtggggtggttgggaatggtttttttttttggaaaaattagagaatggtttggagagttgaaatgagtgtttgtgagtaggtttgtgtagaattgggttttaggattgttgagttttgtagggtgtttttgggggatgttaggttgttggtttttttgtttttgttgagatggataatgttttgtttttggagttttggtttgttaatgtattgggtttggatttggtgttgagttgttttaatgtgttgattttggtgttgttgttggtgttgttggtggtggttgtattagttgtttatgtggtgatttgtgttgtgggtttggtgggtaattttgttgtgttgtatgtgttgttgtgggtgttttgtatgaagattgttattaatttgtttatttttaatttggttattgttgatgagttttttatgttggtgttgtttattaatattgttgattttttgttgtggtagtggttttttggggagtttatgtgtaagtttattgtggttattgattagtataatattttttttagtttttatttttttattgttatgagtgttgattgttatttggtggtgttggttattgtggagttgtgttgggtggttggttgtatttatagtgttgtgtgtgtggtgagtttggttgtgtgggggattgttatatttgttgtgttgttttttgtagtttttgtttggttagatgatgagtagggttggtgttagtgtgtgttagtttttttgtagtttgaggttttttggtggtgtgtgagttgtttttatatgtttgtgttgggttttgttatttttgtgtttattatttgtgttttttatattattttgttgtgttggttgtatgttatgtggttggatagttatgttaaggttttggagtgtgttaagaagtgggtgatttttttggtggtggtaattttggtggtgtgttttttttgttggatgttttattatttgagtattgtggtggtgtttattattgattttttgtagatgttgttggttattgttattttttattttattattagtttgagttatgttaatagttgttttaatttttttttttatgtttttttggatgttagtttttgtaggaatttttgttagttgataatttgttgtgtggtagtttgatttttttagtgtttggttttgtaattgtttgttatttttggttagtgagggaggagttggtgttagagtgtgggattagataggttgtttaggttttttggggaaattgatttgtgttttatatttgatttagtagattggaagtgttgtgattgtgtttgtaggttgattttgttaagttttttaggtgatgtgtggttatgttgggtgaggagaattgaggttgagattgttatattgagggttttttaaagttgaggtggaggaagaggagggtagaggaggagggtggtattgttgggaattgttttttttttgttttgttttttgttgttttatttgagttttggtagtttggaatttggttggagttggaattttttgtgtttttgaagggaggtttgaggatgttgttggtgtttttaggtgttggttttgtgtggtttttgttgtagttggtgtatagttttggtgggtttttttgttttttgtgtgttttgggaagatggttaggtgtgtgtgtttggtgtttatttttgtgagatttgtttggtttggtgttgtgggtggggattgttgttgaggttgttagtgtttttttaattggggaaaatataataatttgggatgttttattggagtgtgtatatatttgtgtgtgtgtgtgtgtggtgtgtgtgtgtttgtggaggtatgaaatgtggggaaagaggttggtgtttggtagtgattgtttagaatatgatatgaatagtgatttttttttttgtttgtttttattttttttttttgtttttttttttttttatttgtgattttttttgaaaatgttagatttttggagtaaggaatttggagtagtttgggtgtgtggttttggtgttttttggaggagttagtggttgagtgtttagtgttggaggattgtggggttttgtggtggagtattttggttgagtgtgttttatagtg

SEQ ID NO: 277 - DNA, 3650 bp, Artificial Sequence
  chemically treated genomic DNA (Homo sapiens)
tgttgtgaagtgtgtttagttggagtgttttattataaagttttgtgattttttgatgttaagtatttggttgttggtttttttagggggtgttggaattgtgtgtttgggttattttgggttttttgttttgggagtttgatatttttaggggagattatggataggaaagggaaaaggtaaagaaaaggagtaggggtagatagaaagaaggattattatttgtattatattttaggtagttattgttaagtgttagtttttttttttgtattttatgtttttgtaaatgtgtgtatattatatatatatatatataggtgtatatatattttgatggggtattttgagttgttgtgttttttttagttgaagaggtgttggtggttttggtagtggtttttgtttgtggtgttaggttaagtgggttttataggggtgggtgttaaatgtgtgtgtttgattgtttttttagagtgtgtggaggataaggggatttgttggggttgtgtgttagttatagtaggggttgtgtggagttgatgtttgggggtgttggtagtgtttttgggtttttttttgaaggtgtggagagttttgattttagttaggttttagattgttagggtttgggtggggtagtagggagtagggtagggagggggtggtttttagtaatattgttttttttttttatttttttttttttttattttggttttagggagtttttagtgtggtgattttagttttagttttttttatttggtatggttgtgtattatttggagggtttggtaaggttaatttgtgggtatagttgtagtgtttttgatttgttaggttgggtatggggtgtgagttggtttttttaggaggtttaggtggtttgtttggttttgtattttggtgttggttttttttttgttggttaggagtggtgggtagttgtggagttggatgttgggggagttaggttgttgtgtggtaagttattagttggtggaggtttttgtggaagttggtgtttaggaaggtgtagaggaaggggttgaggtagttgttggtgtagtttaggttggtgatgaagtaggagatagtgatgattagtggtgtttgtgggaggttggtggtgagtgttattatggtgtttaggtggtagggtgtttagtagaggaggtatattgttaggattgttattattaggaaggttatttgttttttggtgtgttttagggttttggtgtggttgtttagttgtatggtatgtagttggtatagtagggtggtatagaggatatagatggtggatatggggatggtgaagtttagtatgagtgtgtagaggtggtttgtgtgttattagaaggttttgggttgtggaaagattagtatgtattggtgttggttttgtttgttgtttagttgggtgaagattgtgaagggtagtatgatgagtgtgatgattttttatatggttaggtttattgtgtgtgtggtgttgtaggtgtggttggttatttggtgtgattttgtagtggttaatattattaggtagtggttggtgtttatgatggtgaggaagtagaggttggagaaggtgttgtattggttgatagttatgatgagtttgtatatgagttttttgaagggttattgttgtagtaggaagttggtgatgttgatgggtagtattagtgtgaagagtttgttggtgatggttaggttgaggatgaataggttggtgatggtttttatgtggggtgtttgtagtaatatgtatagtatggtggagttgtttgttagatttatggtgtagattattgtgtagataattggtatagttattgttagtggtgttggtagtggtgttagagttgatgtgttggagtagtttagtgttgggtttgggtttgatgtgttggtgggttagggttttgagaatgaggtgttgtttattttaatgagggtagaggagttggtgatttggtgttttttaaggatgttttatggagtttagtggttttgaagtttggttttgtatggatttgtttgtggatgtttgttttagttttttaagttgttttttggtttttttggaggaggggattgtttttagttattttatggtttaatgttgttgtggatttatggggttggaaagaggaatttaaagtataggttagtttgttgatgtgtaattttagaaataggtgtggttttgaggaggggtgggggtggtgttgtggtgttttaaattttttttatgtgagtgttttttgttatttgttgaaattttatttttattagttgaatatattaaatgaaatgttagagagagaagaattttttataggaaaaatgtaaatttttttttttttttttaggaaatttttgtagatttaggttattttatagaattttgtagtggtaagttttggtttttttagggtttgtgtgtttttagtaatagtaagtttaatagtagtttttattttatttggttggttggggaaggggtttgttttttttggagttgttaggagaaaagtttgttggttgtggggaggttgagatgtttgttggttgggtgtttgtttttttttgtttgttttttttgagtttgttagagtttgtagtttgtgtttttgttggttttttttgtgtgtttggaagtgtagggatggtgtagttgtgattgtgttttattgttttgattgttgtgtttatttttatattttaagtaaaatggttttagaatagagaatagaaatttttttaaatttaagggattttttttttttattttagttgtgtaattttattttatttgaaataatagaaagtttttttgttaagaattgaatttaaggaaaataaagttagggtgtaagtgatttatttttaaaggagaataatgtagtggaggtgtttgttttattttttatatattgtaatataaataggttaatgtaatgtgaaatttgaaaggaggaaaaagtgagtgtaattttataatgtaaattatttgttttttgttattttggtttttaaggggatagaagattgttagtatgttttttaaaattatttttatttttatttttgtgtaagtaaagatttgattagtaaagataaatggtttttgtaaagttttttagggaattatgataatgtgtattttataaaatgttataagttgtttaatatattttttatttatttatatatttgtttgatttttttgttaatgagagttattttgtgattgtagtggagagtagttaaggaaggattagtaggggtagttttgaatttttttgttgttatttttttggattttggattttttttttaggaagggaaaattattttaggttttttattagtttttttaagaattgaatgaaataaattaaatattggttatttttaatttttgttttttttttttttttatattttttttaggagagagagtaaattaaaatatgagattatattttttagtaaattatttttttataaaagtaggtgaagtttaaataaagtgtatttttggttttttaggatgtattttagagaagggggtttgagatttagagagatttaaagttggtagtagaagattgtggggttagaaatatagt

SEQ ID NO: 278 - DNA, 2429 bp, Artificial Sequence
  chemically treated genomic DNA (Homo sapiens)
gttgttaaggttgtggtgttatgtttttaagtggatatggtagaagttttggggttagatataagatttttaagtttgaatgggtagtgtaaaatttagataagttttttggtagtgttgttaatttttgttaggtatagaagatatagtgagaattgtgagttgttatgaaagtttaaaatattgagtttgtgttttgttaagtagtaggtgtataaatttatatttttgagtgttttttggaggttttgtttattttttttttttgagttggttagagatttggaagagggtgggttaagggtgaggagggtagtatgtgtatgtgtgtttaggatttagttagtgagttaataaggaattttgtgagtgttgaaagttggtggtgtaggttgttgttttggatgttggtgagatagatgttattttttagaggaagaggaggaggtggtgaagtgtttttttagttttagttttttttttgttttttttttttttttttttaattttttgtttttttttaaattagttggttttttttgattttagtgatttgtttggttttgtttatttttgttgatgtgatttttgttgtgaggtaagtgttggtggaatttagagttttgtggaagagtagaatgtttgggagtgtgtagtttttgggtttggtttaggtttgttgtggaggtgtggtgtaggggagtgtttgggtgggagttttgtttttttattagtttattgtgatgtagtatttaggtttaggtttttttgtttatttttgttggatttgggtttttggtagtagtgggtgatgtagatggaatattatgttgtttgtggttgagtttttgttatttttgttttttgagagtgtgttttttaagtttgtagttttgattgttagtggtgggagtaatagtagtaataaaggtggttttgaaggtgttgtggtgtaggtggttgtgtttgtggttagtgttggttttgtagatgttgagatggaggtgagggtgatttgtggtatggggagtgggtgtagtggggaggaggagttggtttttttgttggattgtggtgattggatgtagagttgggtttttttttttgtattagatttagttttatattttgtggatatgaaatgatgtttttatttttgtttttttgtttttattttatttgagttaagtaaaatggatttttggttttttatatttaaattatttgttttttttgtgaattttgataaatatttgaatgtttttagtgaatagatgtttttggttattgtggtttgggggatttattgttttttttttattagatttttataatttttttttttatttttgaatgtggtttttagtttttattaaattttggggaagggtgaggagatgattttttaggagtgggatgtatgggtggggtgaaggaggtatttaaaagtagtgtgtttgaggatttgggttttttttttttttttttggtttttgtaggggtggtatttgttgtgggtagaaataatggtgagagttggatggttgagtgtgtagtggggataagtggggtgtagttgtttttgtgaagggagagaaggttttttttaggtattattttattggaagggaagtaattaaggtagtagtagttgttttggattttttgtttaatttaggggggatgaataagtgtaggaatgaattagagaattaggtgtagttggttggtttttagtttggtatttttttttttttggtttttggttttaagaaaaaaaaaaattagtattatttgttgttgagatttatgggtttgggttgggtaggggatgttgatagtattgagggggttggaaagatgggggaagttgttaggtgggtaaattggatatgtttttaggttttgtatttgggaataaagtaattgttttttttaatttttatttttttggtttttgatttgttttgagatattttgtgagttggagtttaaagatttttgggatttttttatttttagatagaatgaaagtaatattgttttgaagatgagttttgatgtagaattattatatagtaagaaaatggtagtgtaatttattattgaggtttttggtatagtagttatatttgggtagttggggttaagtaatattaatgttagtaattatttaaagaatttttagtggtgagggtaggtttagtgatataggaatttttgatagtttttgtagttttgagtgattaagataagattatttttaaattaaaatatatttagtgttgtttttttttttttaaggaaatggtttttttgggttattagggttttttaatttggatttttgttttaaggtttaaggggtttgatataaagtaattatgtgtaaatgtgtagttttttataaaaattgtttatagtttttt

SEQ ID NO: 279 - DNA, 2429 bp, Artificial Sequence
  chemically treated genomic DNA (Homo sapiens)
gaaaaattataaataatttttgtagagaattgtatatttatatataattgttttgtgttaaattttttaagttttggaatagaaatttaagttaaagagttttagtaatttaaaagaattatttttttaaggaaaaaaaagtaatattgaatatattttaatttggaagtaattttattttaattatttaaaattataggaattattaggagtttttatgttattaaatttatttttattattaaaagttttttaaatgattattaatattaatgttatttaattttagttatttaaatataattattgtgttaaaagttttaatggtaaattatgttattatttttttattgtataatgattttgtattaagatttatttttggagtagtattatttttattttgtttaaggataggaaaattttagaaatttttgggttttgatttataaaatattttaaaataggttgaaggttaagaaaataaaaattggaaggagtaattattttgtttttagatgtaaagtttggaagtatatttaatttatttgtttggtagttttttttatttttttagtttttttagtattgttagtattttttgtttaatttaaatttataagttttggtagtgagtggtattaattttttttttttttaaggttagaggttaaaaagagaaaagtgttggattgagagttaattaattgtgtttggttttttaatttatttttatatttatttattttttttaaattagatgggggatttgagatagttgttgttgttttggttgttttttttttagtggaatagtgtttgggaggggttttttttttttttatagaagtagttgtgttttgtttatttttattgtgtatttggttatttagtttttgttattgtttttgtttataatagatattgtttttgtaaggattgggaagaagaaaaggaggtttaagtttttggatgtgttgtttttaaatgttttttttattttgtttgtgtattttgtttttaaggggttatttttttgtttttttttgaagtttggtggaaattaaaaattatatttagaggtaggagagggaattatgggagtttagtgggaaaaaaatgatgggttttttgggttatggtaattaagaatatttgtttattgagagtgtttaaatatttgttaggatttatgaaagagataaataatttaaatgtgaggagttagaaatttattttgtttagtttgaatagggtaagaataagggagtaagagtgagagtattattttgtatttatagggtgtgaagttgagtttggtgtagagagagaaatttggttttgtgtttgattgttatgatttggtgagggagttagttttttttttttgttgtatttgttttttatgttgtaagttgtttttatttttattttggtgtttgtgggattagtgttggttgtagatgtaattgtttgtgttgtgatgtttttggggttgtttttgttgttgttgttgtttttgttgttggtgattgaggttgtgggtttggaaggtgtgtttttgggaggtgggggtggtggaggtttggttgtggatgatatgatgttttgtttgtgttatttgttgttgttagaggtttgagtttggtggggatggatggggaggtttaggtttggatgttatgttgtaataaattggtggaggagtgagatttttatttgagtgtttttttgtgttgtgtttttgtgatgggtttgagttgggtttaggagttgtatatttttaaatgttttgtttttttgtggggttttaggttttattggtgtttattttatggtgggaattatgttgatgagggtgggtggggttagatgggttattgaggttaaggaaggttggttgatttagagaagggtggagggttgggggaagggaaaaggaaaatgaaagagagattgaggttgggaaaatgttttgttgtttttttttttttttttggaagataatatttattttgttagtatttaggatgatgatttatgttattgatttttaatatttgtgagattttttattggtttattgattgggttttgagtgtgtatgtgtatattgttttttttatttttggtttgtttttttttagatttttagttggtttgggagagaagagtgggtgggatttttagggagtgtttggaggtgtaggtttgtgtgtttgttgtttggtaggatgtgagtttagtgttttaggtttttgtaatggtttatggtttttgttgtgttttttgtgtttgataggggttggtggtattattggaaaatttgtttgggttttgtgttgtttatttaaatttggaagttttgtgtttggttttaaaatttttgttgtatttgtttagaggtgtgatgttatagttttgatgat

SEQ ID NO: 280 - DNA, 2284 bp, Artificial Sequence
  chemically treated genomic DNA (Homo sapiens)
tgtggtattgttttttgtattgtagggttttttgggattgatagattttggataatagtagttgggaaatattttaaatatataatatatttttaatttttaaatattggagttgtggggtttttttttttttttttttttttttttgggggttggaggtggaattttttggaaaattttggtattttgtttttttattaattttattttttgtggttgtttttattaagatatattttttttttgataatttttttatattgtatttagtataatagatgtatttgtggatttattgggtttttattgggttttgggaatattgatgttattttatttaaaaattaatttaagtttaatgttttgatgaaaatgaaaatatatttatagggaagtaaatatttatagttatttagttttttaaatgttatatatattttattttatttaaagtgttttttttttttttttaattataaaataatttagtttatttttaggaagatttttttatttattgtttttagttatgttagtatatttttggttttaaggatagagaatagttaggagttatagtattttgttttttattttttgtatgtttttttttaatttttatttttttttttttttgtgttgtttttttttttttttatgtaaagtagaataagaagattgttttttataaagataataggttttttttaattgtaaatgattatattataagttgtatttgttagttaattagtgtatttaagtttttgttagtggatgttgaaatgatgtttgtaataattgattgggtttttgtgagtttagggatgtagattttttttttttttgttttttgtgtgagttttagttgttaatgaaaattgtatgaaatagattttttttttgttatgtaattggttttttttttgttttttggttgatttgggtataatgttttttatgagagtggagatgtttgtggtgatggtggagttggggaaggggatgtggggatttgagagtatggaatgttttgtttaggtggatgttagttttttgtttgtgagtagtttagtgtattgtttatttggttgtggatggggtggttttatttaattatgatttttttttttgaaatggagtaagattgaataatttattatatgatggatggtgagggaaggaaatgtaaaaaagaaaaggaaaagaaaaaaattggaattagatggttaaattttatattagtattgagaggttgttaggagattttattttgtttgtggttgttttggttttaggtttggttttttggtgtttgtgggtttttatttttttgtttgtttagtttttttagttaggtgtggttgtttttggattggttttttttggttgagtgtggagagtagggttgggtgttggggttaagggaggggtggaggggtgtgtgtttgggtagggatgggggagggagattgggtggaatgaagtggggaaagataagagtggtagaagaaaaaaaaaatttttggttaggagaaaagtggtggattatgtagagagatgttatgaaatttgtagatttaatgaatgttatttaattttagttgattggttgagttttgttggtagtgtatgaagtgatgtggttttgagataaaagtgagtgtagtgttgtgtgttggggaaaaagttgtatagtgttggtgtggtttgggaggaaggggtgggggtgagtaggatagagttatagatttagagatgtttattttgttgtttatgttagttagtgtgttagtgtgttgaggattgggtttggtgggggtgggttgggtataaattaatgtgtattttttgttattggaaatgtgggtgttttatgttgggggaattttttgggttttggtttttgattttttagttttaattttttttttagtgttattaagtaagttatttttggagaaatgtttggaaagtaggaaagagttgaagtttggggagtagttttgtttgttggttgtaggggtttggtttttagggttttgtgagataaggaaaaagaggttttgggtattgttttttattgggttgaaatttgtgagaggtagttttggtgtgggagttggagtttgtattgtttagagggggtgtagtgagtggttgggatggaggggaggggttttatttttgagttttgtttgtatttggtggtgttttagtttgttgttttatttagttttttttgttttgtttattgtaattgggatttggttttggttgttgt

SEQ ID NO: 281 - DNA, 2284 bp, Artificial Sequence
  chemically treated genomic DNA (Homo sapiens)
gtagtagttgggattaggttttagttgtagtggataggatagaagggattgaatggggtagtaggttggggtgttattaggtgtaagtaaagtttagggatagggttttttttttttgttttggttgtttgttgtgttttttttgggtggtgtaggttttggtttttgtgttggggttgttttttatggattttagtttggtgggaggtagtgtttagagtttttttttttttattttataaaattttaaaagttgaatttttataattagtagataaaattgttttttgagttttggtttttttttgttttttaggtgtttttttgggaataatttatttagtggtattgggagaaaggttgggattggggggttggggattgaaatttaaaagatttttttagtatggagtatttatgtttttagtggtgggggatgtatgttggtttgtgtttagtttgtttttattaagtttggtttttgatgtgttgatatgttagttggtatgggtggtggggtgggtgtttttgggtttgtggttttgttttgtttgtttttgttttttttttttggattgtgttggtgttgtgtggttttttttttagtatgtggtgttgtatttgtttttattttggagttgtgttgttttgtgtgttgttagtggggtttagttagttggttggaattgagtagtatttattgaatttgtggattttatgatgtttttttgtgtggtttattattttttttttaattggggatttttttttttttttgttatttttatttttttttattttattttatttagttttttttttttgtttttgtttaaatgtgtgtttttttgttttttttttggttttagtgtttagttttgttttttgtgtttggttagagggagttagtttggagatggttgtatttggttggagaggttgggtgggtggaggggtggagatttgtggatgttgggaagttggatttggagttggagtagttgtgagtagaatggagttttttaatagttttttggtgttgatgtgaaatttgattatttgattttagtttttttttttttttttttttttttgtattttttttttttgttatttgttgtgtagtgaattgtttagttttgttttgttttaagagaggagattatgattgagtgaagttattttgtttgtagttaggtaagtggtgtgttgagttgtttgtaggtgaggagttggtgtttatttgggtgaggtgttttgtgtttttgggtttttgtgtttttttttttagttttgttgttgttgtaggtatttttatttttatgagaaatattgtgtttaagttagttgaaaggtgagggagaagttggttatataatagaaggggaatttgttttatatggtttttattagtgattgaaatttgtatggggggtgggggaaggaggggtttgtatttttgggtttgtagaaatttagttagttattgtagatattattttaatatttgttggtaaagatttaaatgtattgattaattgataggtgtggtttgtgatgtagttatttatagttgggaaaagtttattgtttttgtggaaggtagtttttttgttttgttttgtatggagaggagaggagataatatgaaagggaggaaaagtgagggttggggagaaatatgtggagaatgggaaatagaatattgtaatttttaattgttttttatttttaaaattgaagatgtgttagtatgattaaaaatagtgaataggaagatttttttaggagtaaattgaattattttgtaattggaagggaagaaaaaatattttagataaaatgagatgtgtgtggtatttagaggattgggtggttgtggatatttgtttttttgtggatatatttttatttttattaaaatattaagtttggattagtttttaagtgaaataatattagtatttttaaaatttaataaaagtttagtggatttataggtatatttgttgtattaggtgtaatatggagagattgttagggggaaaatatattttaatagaaatagttatagagggtgaggttagtggagaaataaaatattagaattttttaaagaattttgtttttaatttttaaaaaaaggaagagaaaaaaaaaaaaattttataattttagtgtttgggagttggagatgtattatatgtttagagtgttttttaattgttgttatttaaagtttgttggttttggggagttttatggtatagggagtaatgttata

SEQ ID NO: 282 - DNA, 2290 bp, Artificial Sequence
  chemically treated genomic DNA (Homo sapiens)
aatgtagtaatatttgggtttatttagtaatatagttattatttatatatatttaaaggttattaagataaggtagatgtaggatagtttttttatttgtttattaaaatggaaattttaggttagtttttataagaaatgggaaatttaagtgattttggtgaaatgatttttgagaaaattttttaagggtaataaaataatattttaaataaatagattttatttgagggaatggggatattatatagtaattgatatttgaatggttttaaatggattgatttgttgtaagttttgaggttgagttaaatttttatgaagaattattaggaatagggttattagaaaattaagttttaaaagtgtttttgtttttgttgaaggtattatattttggtatttttaagaattgttttttgagggagggaataaaggagagtggataatttgtagtaaattttttttttatgtttttagaaaatgtagagatgataggatttgaaaatttttgttataaagatggtttttaaaaatgtatataattttaaatgattatttgggtagttataattgtatgtttatagtttgtatttagaggtatggttttatgttttggttttgaaggataataaggaggtttttaaggaaatgttgtgagaaagattgttggttaagtattgttatggttattggaggagtatttgttagtgaattgatgttggtttttttagttttattagtgtatgtatattagtttgtgtattttggttgttgttggtaggttttattagttaagttggaggagtagttgttgtaattatggtaagtgaattgaaattttagagttggttttgtttggtagagtgtttgtgttttttgtgtagtgtatgttttgtgtgtaaatttgagatgtgattgtgagttgtgattttgtgtggttgtgatgggttttatttaatgtgtatgaggggattattattgtttttgttttgggtgtttgtggttttatattatttttgtatataatgtggttggtgttaagtttttaaatgttttgagagttttaaggattgtgtgtgtgaaggtgttgtagtaagtgggtatatattagatattattttggtgtgttttgtgggagaagttagtgtatatatttttttgtaaggtggggttgttagtgtaatataggaattttgttttttttttagaaaagtttttttttttattttttttttaatatatttatttgtgttttaatagttttttttttgtgttatatgtggttgtatttgggtatgtttatgtttgtgtatgttgttaggtgtgattgtttttgtttggtttttgttgtttttaatttgtttgtgtttatgggaggggtggtgttattttttgaggtgtttaattttttttatttttgttgtaatgggttgagttttaggaattttgtgggtataatttttgttgtttttattagtgtttttgtttagagtttggattagggtgtattatttttattttgttagatgtagtgggggtgtgtatagattttagttttggtgtttaaaatggattaggggtaaggtgtggatgttgtttttgtttttatgtttttagtatttgtttgttgtgatttgaagttgtagttattatggtttgtgttgttggttgttagtattgttgtggaggagttgtttggggtgagttttgtggagaggtggtggtggtggtggtggtgggaaaggggattggaagttggtggaatttttgttttatttgtgttgtgttgtgttgtgttggtaattgttttttttatttggttggttattgttttagtgatgtttaggtgttgtggttttgttgtttgtagtggggtgggaaggaggggtttgtttggaagagtgttaggaggtggggttggtggtgagtttgtggtgttgtggttgttgttggtgtgtgttttgtttgattgttttttgggtttgtgttggtagggagatgttgggttttagtagtttagttttgtttttttggatttttgagttttattaggtttttttgataaggtttttttggatttggtggagagtgttgagtgtttagaggaggttgattttaggtgtaagtttgtaaattttgaggtttggggtgttaatggggagttagagtagttaatgtgggggttattttatgtgtttataaatgtatttataaatatatataagtatatatatatatgtgtgttttttttaaaaattttttttttttttttattttgtagttaagg

SEQ ID NO: 283 - DNA, 2290 bp, Artificial Sequence
  chemically treated genomic DNA (Homo sapiens)
ttttggttgtgaagtagggggaaaaagagaatttttaaaagagatatatatatgtgtgtatatttatatatatttataaatatatttatgaatatataaagtaatttttatgttagttgttttgattttttgttagtgttttgggttttgggatttgtaaatttgtatttggaattagttttttttgggtgtttaatgttttttattgagtttagagaaattttgttggggaagtttggtgagatttggaagtttggagggatggagttgagttgttgaagtttggtatttttttgttggtatggatttgaagggtggttgggtagggtatgtgttggtggtggttgtggtgttgtgaatttgttgttggttttgttttttggtgtttttttaagtaagttttttttttttgttttgttataaatggtgggattgtggtgtttgggtgttattgaggtagtagttggttgggtgaggagggtggttgttggtgtggtgtggtgtggtgtgggtggggtgggggttttgttggtttttagtttttttttttgttgttgttgttgttattgtttttttgtggagtttgttttgagtgatttttttgtggtagtgttgatggttagtggtatgagttgtagtagttgtagttttgagttatagtaggtaagtgttgggggtgtgggggtggggatggtgtttgtgttttgtttttggtttattttggatgttgaggttaaggtttgtgtgtgtttttgttgtgtttagtagggtaggggtggtgtgttttagtttgaattttgggtgggaatattggtgggggtggtggaggttgtgtttgtgaagtttttagagtttagtttgttgtggtgggagtagagagaattgggtgttttgggaggtggtattgttttttttgtgggtataagtaggttgggggtggtgggagttgagtggggatagttgtgtttggtagtgtgtatgggtgtggatgtgtttgggtgtggttgtgtgtagtgtaagaaggaaattgttgagatgtaggtgagtgtattggagggaaagtgggggagggggtttttttagaaaaagggtaggatttttgtgttgtattggtaattttgttttgtgggaggatgtgtgtattggttttttttgtggaatatgttggggtggtgtttggtgtgtgtttatttgttatggtgtttttgtgtgtgtggtttttggagtttttggggtgtttggagatttaatattggttgtgttgtgtgtggaggtggtgtagggttgtgggtgtttagggtaggagtaatgatgatttttttgtgtgtgttaggtgaggtttgttgtagttgtgtgaggttgtagtttgtggttatattttgggtttgtgtgtgaggtgtgtgttgtgtgggaagtgtgggtgttttgttgggtgaggttggttttgggattttagtttgtttgttgtggttgtggtagttgtttttttagtttggttggtagggtttgttagtggtggttggggtgtatggattagtgtgtgtgtattggtgagattgggggagttagtgttggtttattggtaggtgtttttttagtggttgtgataatgtttagttagtagttttttttatggtatttttttaaaagtttttttgttattttttagggttagagtgtaaaattatgtttttagatgtgagttatgagtatgtagttgtagttgtttagatggttatttagaattgtgtgtatttttaaagattatttttatgataaagatttttaagttttattgtttttatattttttgaaaatatgggaaaaggatttgttatgagttgtttatttttttttatttttttttttaaagaatggtttttagaagtgttaaaatgtaatatttttggtaaggataaaagtgtttttaaaatttaattttttagtggttttatttttaataattttttataaaaatttagtttagttttaaaatttatggtgaattagtttatttaaaattatttgaatattaattgttgtgtaatgtttttatttttttaagtaaaatttgtttgtttgaaatattgttttgttgtttttgaagagtttttttaagaattgttttgttagagttgtttgaattttttattttttgtggaagttgatttggagtttttattttggtgagtgggtggaaaagttgttttgtatttattttgttttagtaatttttgggtatatataaatggtgattgtattgttgagtggatttgaatgttattgtatt

SEQ ID NO: 284 - DNA, 5909 bp, Artificial Sequence
  chemically treated genomic DNA (Homo sapiens)
ggttgttggagtagggttttagtgtattgtgagtttttgttttttttgttttgtagtgttgtgagttttttttttttttgtgtttggttttgtttgtgttttttttggtgtgggtatttgtagatttgttaggaggttgatgagaggtgtttttatagagttttgtttttttttagatttttaaatgaaaagaaagagaaaagttaattttttgtttttattttgtatgtatttggagagtggttggtggtgagtgatttgtataattgttttttttgtggtgtttttggatgggtggagagaatttgggtgattgagtttgaggttgagtttttttgggagtgatttatgttagttatttttatttttaagggggatttgtggttgggtttatgtgtgaaggatgggtgttagggaaattgatttatagatgatttgttttgtgagagattgataatttagttttgtgggtttttggggtgtttagattagtttttagttagaggatttggggttgtatagtttttggattttggagggggtggtttgggggtgggagattgtgagtattagtttatgttggtttttttttattttgtggtggtgaggtgggaagggttaggatgtgagtttagtattttttttagaaatgtagtattttgtttttttattttttttgtttttggtgtttttttttttatgtgtttttttttgttttttttttaagggtgttttttttttgtttttagtttatgtttgaattttttggtgttttttttttttttttttagttttttttttatgttttttgtttttgggtattttttttttttaattttttatttttgtattgtttgattttgaggggtgggagtgtattgggttgtgtatgggtgggggtgttgtgttagttttgtgtagttgttttgatgttgttgttgttgttgttgttgttgttgttttttgtagtttagtttgtgttttgtggtagttttgtagtgtattagttattattgttgttgttgttgttttgttagatttgttgttagtttgtttggtttagttttgagagagttttgaatgttagttgtgagggttatgagttagagagttttggggtgttgtgtggagagtaagtggagatagtgattttgtgttttttagtttttgtttttttgtattgtgttttttgtatttttgggtttttttgttttttttgttgtttttattgttgttatggttattttgttttgtagtaagttgtttaatgtggttatgtttgtgtttaataagttttaggttaagatgagtggtatgtttgttaggatgggtttttaggtggttatggatgaggaggtggtgggttttgtgtattgtgatgattttgattttgagtattgttagggtttgtagatggatattttgaaagttgagggagagttttgtggggatgagggtgttgaagtgtttgttgagggagatatttattattagtgaggtagtggagtttttttgttgttttttggttttaaggattaggtgggaggtggtggtgaatttgggggttatgataagtttaaaattatggtgtgggaggtaggttggaatgtgattaatgttatttaggtaagtgtgggatttttagttttgtttgttttttttttttttagtttagtgtgttgggttttgtttttgatagttgtttggtgattttggtttggagatttttttttgtatttaggaatttttttttttttattttttttagttttgtgtggggatttatgtttttaggtggtgttttttgttttaatttatgtttttttttaatggtattagttgtaagattgttaggttgaagtttggtttgagatatttgtttggagatattgtaaaagtgaaggaaatggggggagggagtaggaagtgatgagaaagaaagaaaattaggattggagggtatggtttggttttggattttggaatggatttatagttgtatttttgggaggaaagaagaaggggaaattgttgaggttggagttttttttttttgtatatatgtatagatatgtatatgtatataggtaggtatattatatgtttatagtttttttttttatgaataaaggtgtaggtataggtgtatatgatatgtatttatatatagattatagtattatttttaaatgtatttgtgtatatttttatagttttataaataaaagtatatatttgtatatattaaatatatgaatatttgtttgaatatatgtatatatatatgtatagatgtatgtagataggaattagtttgtttttttgggtgtggttttgttggagatatataggtatatatatatgaaagtatatatatgtttttatataaatatatttagtttgtaataatttagtattatttgtgtatagatttgttttttttgtttgaaattttggttgtattgtaaagaggtggttagtttttttttgtgtgattttggtgaagttttttttagaggttaagaatggtttttgttttttaggttttttttttttatttttaattttttattttttattaggtggtgtaggatttttatatagggagtaggtttggagttttggtaatgatttttgagttagtaggggttggtaggttgtagttttttgggttgaaggagattttagttttaggtaattttggttttttatagtttggttttgtggtgtttttggagtgtattattattggggttatggaaggtaggttttttgggagtagaggttttttaggggttgttttatgtattggggtaagtaggattttattgggttttgaatattagatggtttgatttaaggtgttttttgttttggggtttggtgagatggttttgttggattatggatttggggttgtttttgtttttgttgtgttttgtgattttttggggtgttttttaaggttttgtttgataggttttaagggaggttagggtaggaggttggaggtttgtaggtttttgggattttggattttgttagtttttagtttttgtgtggattttaaattttatagttttgtttgtttgattttgaagtttttggttttagatttttgtttggtttggttttttggtttttttggtgtttttttgttaagtttttttttttgtttgtttttttagtttttatttagtttttttttttaggttttgtttttgttttattttaattttagttttgttttaagatttttaatttttagttttgtttttttttttttgtgtgttgttttttaagtgtttttatattgtttttgtttttgttttttaggggttttgttttatttttagtttttttttttttttattttattttttttttgttttataattgtagtttttaatgtttttttttttggtttgagtttgagatgtttgagtttttttttttagtttttgtgttttattttagttttattataaattttgtgtttattttttttattggtttaggtttagtttattattttttttagagtttttttttgattatgtttttttttgtttttttttatttttttttttaattttttattttgtttttgtttttagaaattattttgaagtatttttttttttttttgtggtttttttttatttttagtttttttttattttagtttttttgttattattagttattagtgtattttttttttttagatttgtttatatatttttttttttttatttttggtttgatatttgggtttattattagtttttttatatttattttgtagtttgtttttaattttttttttttggtggtttagatttaatttttagtgtttttagtgttttttttgggttatagtgttaagttatgttttttgggttttttatttgttgttaagtttgttgagtgtttgtgtttggttgtttttttgttttatagggtatgtttgtgttgggtttattttatgttattttgtatggtggttatttggggttgttttttattatttttgttgttgttgtgtgttgttatattggtaagatttttattgtgtgtttgtatgaggagaatgaagatggtgaggtggtgtgtgtgtgggatttgtatgtggttatagttaatgtttgttgtgttttgtgttttttaatgttgggtggttgagtggtgaatgtagtgtagattattgagttggtgatgatgtgtattttgtatgtggtggtgagtggtaattttatgtataatagttttttggggttgtttgtgttgtagaagttttggtttattattgttatggttgtgttgttgttttgtgttttttttaagaattttaaggttgtgtttaagtttagtttgttgtgtattttggtttattttgttattaatattttggttatagtttattgtttattgtgggtgtgtgattgggtttgggagaaggttaagttttatattgatgttaagaagttttttatttttattggtattattgtgtttagttatatgttttagatttttttgtttttgttggagggtaatatgtagtagtttagtgagttttattgtatgatgaattggatgtatattgtagtttgtgtgtttaagggtttttttgtgtttgttgtttattttatttgggttgatgagattaaggaggttattatggataatttgtttggttttatttgtgttgtggttaatatttttttggtggttaaggtgttgttgttttattttttgttattttttgttgttgttgaggtgttggagaagttgtttttttaggaaggtagttgtgttttttttttggtttgttatagtggtgatgggtgtttgaagttttgggggttgatgttgtgttgtgtgtttgttgtttttatgttgtttatggttatttatgtgttgtattttgtgttgtttatgggttttattggtagttttatgggtgttggtttttgttttttgttgtttagttttttttatttgtgtttgttttggtgtaagttgttgtggtattaagttttttttgatgttgttatttttgttattggtggtatttgtagtgtgtttggttttgtgtatttttttgagggttttattgaagtttattgaattaatgtggaggattagggtgtaagggtgagtttttgttgtgtttttgtgtttttttttttttttttttattttgtttttattagtttagtgtgttttgttgttgtgtttgggaggttaagttttaaatatttttggtttttagtttttgattatttggggatgggggggatgggaggggatagggatttatgatttattgtgtttgtgtttttgttgtttttttttttttataatattttggttttggggggaggtggggtgtatttgtgggtagggttttttgtttttttaagtggggttttgatattttggttttagttattgagggggttgggaagggagggagagggggtgtagtttgtaggtgtggtaatttgattttgggggaatattttatatttatttagagtttggaatttatagtgtttagttatttttagtaagagtgttttttattttggagatgttttaattttgtagtgggaaaggttgattgggaaatttattttgggtgggtaattttttttaatgaagttggaaggtgagaagttgtggtggggttagtttgtttgttggtttttaggaatttaaatttttattttgtgtaatttattaggtgtggaattgttttattgtgtgtgtggtgtgtttgtggtgaataagatgaaatgtatattagaaaaaaatttatttttaatttagagtgtggtatataattatatttgtaaataaagaagagataaaggtttgtgtggtttggtgttgggtttgtg

SEQ ID NO: 285 - DNA, 5909 bp, Artificial Sequence
  chemically treated genomic DNA (Homo sapiens)
tataaatttgatattgggttgtgtaagtttttgttttttttttatttgtggatataattatgtattgtattttaaattagagatagatttttttttgatatatattttattttatttattatgagtatattatatgtatagtagaatagttttatatttgataaattgtataagatgagagtttagatttttgaaaattggtaggtaagttggttttgttgtggttttttgttttttggttttgttgaaggaaattgtttatttaaaatggattttttagttagttttttttgttgtagggttgaaatgtttttggaatgggaagtgtttttgttggaaatggttggatgttgtagattttgagttttggatggatgtgaaatatttttttaaggttaagttgttatgtttgtgagttgtgttttttttttttttttttttaatttttttgatgattggaattaaagtgttggggttttatttggaaggatagagaattttgtttgtaaatgtattttgtttttttttaaaattagggtgttgtggaaaagaaaggataatagaaatgtagatgtgatggattgtgaatttttgtttttttttattttttttatttttgaataattagaaattaggaattagagatgtttaaagtttggttttttaagtgtggtggtagggtgtattgggttggtgggggtggggtgaggggagaagggagagagtgtagaagtgtggtgggggtttgtttttgtgttttagttttttgtgttggtttggtaggttttgatgaggtttttgagggagtgtatgaagttggatatgttgtagatgttgttgatgatgaagatggtgatgttgaagaagatttggtgttatagtagtttgtgttagagtaggtgtaggtgaaagaggttgggtagtaagaaatagaggttggtgtttgtgaggttgttggtgaggtttatgagtagtgtgaagtgtggtatataaatggttatgagtagtgtgaagatgatgagtgtgtagtgtagtgttagtttttaggattttaggtgtttgttgttgttgtagtaggttgggaaaaaggtgtggttgtttttttggaagagtgatttttttagtattttgatagtggtaaagaatggtagaggataggataatagtgttttggttattagaaagatgttgattatggtgtggatggagttgggtaggttatttgtgatgatttttttggttttgttggtttaggtgaggtaggtgatgagtgtgaagaggtttttgagtatgtaggttgtgatgtgtgtttagtttattatgtagtggaatttgttgggttgttgtatattgttttttagtgaaggtaggaagatttgagatgtgtagttgaatatgatgatgttaatggagatggggaattttttgatgttgatgtagaatttgatttttttttaggtttagttgtgtgtttgtgatagatagtaggttatgattaggatattgatgatgaagtgggttagagtgtatagtagattgaatttggatatggttttgaggtttttaaggaaggtgtaaggtagtagtatggttgtggtgataatggattaggatttttgtgatatgggtagttttgggaagttgttgtatatgaggttgttatttattattatgtataggatgtatgttattattagtttgatgatttgtgttatgtttattatttggttgtttagtgttgggaagtgtggggtgtagtaggtgttggttatggttatgtatgagttttgtatgtgtattattttgttgtttttattttttttgtataggtatgtgatgaggattttgttggtgtagtagtatataatggtggtgaagatgatgagaaataattttaggtagttgttgtgtaggatggtgtagggtaggtttagtatgaatatgttttgtggggtggagaggtaattagatgtggatgtttagtgaatttggtaatggatgaggggtttggggggtgtggtttaatgttgtggtttgaagggggtgttaaggatattgagaattgggtttgagttgttggggaggagaggttaagagtaggttgtggggtggatgtaggggaattaatagtgagtttgggtgttgagttagagatggagagggagggatgtatggatggatttgagaaggaaaggtgtgttaatggttggtgatagtgagagggttagggtgggagagggttgagaatagggagaagttataggagggaagggagatattttgggatggtttttggggataggaatagaatgaggagttgggggaggagatgagaagggatagaagggagtgtagttggaaaggggttttaagaaaggtagtgagttgggtttgggttagtggaaagagtgggtatgggatttgtggtggggttggaatggggtatgggagttaaagaggaaaatttgggtgttttaggtttagattagaggaggaaatgttaaaggttgtagttgtgaggtgaaaaggaaatagggtagagagggagaggggttgaaggtggggtaaagtttttgggaggtaagaatagagataatgtgaagatgtttggggagtagtgtgtggggaggaggaagtagggttggaaattgagagttttaggataaggttggagttagagtgaggtgagggtgagatttaaggaaggggattaagtggaggttggggaggtaagtaggaggaggagtttggtgggaaggtgttagggaggttagaaagttgaattgagtaagagtttagaattagaagttttagggttaggtggatagggttgtagggtttagaatttatatggggattaagagttaatgaaatttagggttttggaggtttatgagtttttagttttttgttttggttttttttggggtttattaaatggagttttgaaagatgttttgggaagttgtggggtatagtgaaggtgggagtagttttgggtttgtgatttagtaaggttgttttgttgggttttggagtggaaagtgttttgggttgggttatttggtgtttggggtttggtggagttttgtttattttgatatatggaataatttttgggaggtttttgtttttagaaaatttgttttttgtggttttagtgatagtgtgttttagggatgttgtggggttaagttgtaagggattggggttgtttagagttgaagttttttttggtttagaaagttgtggtttgttagtttttgttagtttggaggttgttgttaagattttaaatttgttttttatgtaggagttttgtgttgtttggtggggagtggggggttaggaataaggggagagggtttagagagtaggggttatttttagtttttggagagggttttgttagggttatatggggaggagttggttgtttttttgtggtgtagttgggattttgggtgagaggggtgagtttgtgtataggtaatgttggattattgtggattaaatgtgtttgtgtgggagtatgtgtgtgtttttgtgtgtgtatatttgtatgtttttaatagggttgtatttaagggagtaggttggtttttgtttgtatgtatttgtgtatgtgtgtgtgtatatgtttaaatgaatatttgtgtgtttggtatgtgtaggtatatgtttttgtttgtggagttgtaggggtgtatgtaggtgtatttggggatagtattgtggtttatatatagatatatgttgtgtgtgtttgtgtttgtgtttttgtttgtgggaaggggggttgtgggtatgtggtgtgtttgtttatatatgtgtgtgtgtttatgtgtgtgtgtggggggaggagattttgattttagtgattttttttttttttttttttttaaaaatgtagttgtgaatttgttttagagtttaagattaaattgtgttttttaattttgatttttttttttttttattgttttttgttttttttttttattttttttatttttgtagtgtttttggataggtgttttagattgaattttagtttagtggttttgtagttggtgttgttgggagggagtgtgggttagggtggaaaatattgtttgggggtgtaggtttttgtgtagggttgggagggatggagaaagggagatttttgggtataggagggggtttttaggttgagattattgggtgattgttgggggtagagtttggtatgttgagttgggaggggggaggataggtagaattgggaattttgtgtttatttggatggtgttggttatgttttagtttgttttttatgttgtgattttgggtttgttgtggtttttgaatttgttattattttttatttggtttttggagttggagggtggtagaggagttttgttgttttgttgataatggatgttttttttgatgggtgttttagtgtttttgtttttgtagggtttttttttggtttttaggatgtttatttgtaggttttggtggtgtttaaagttgaggttgttgtaatgtgtgaagtttattgtttttttatttgtggttgtttgaaaatttattttggtgaatatgttgtttattttggtttgggatttgttggatatggatgtggttatgttggatagtttgttgtggagtaaggtggttatggtggtggtggggatagtggaaaggatagaaggatttgaggatgtggggaatgtgatgtaagaaggtgagggttggggggtgtaaagttgttatttttgtttgttttttgtgtggtgttttggggttttttggtttatgatttttgtagttggtgtttgaggtttttttagggttggattgggtaagttggtagtaggtttggtggagtggtggtggtggtggtggtggttagtgtattgtggagttgttgtggggtgtgagttgggttgtggagggtggtggtggtggtggtggtggtagtggtgttagagtagttatgtgaagttggtgtggtgtttttatttgtgtgtagtttaatgtgtttttgttttttggaattaggtggtgtgggggtgggggattggagagaggaaatatttggaggtaggggatgtgaggaaggggttaggagaagagaaagggggtgttgagggatttagatgtgagttgggggtagaagaagggtgtttttgggaaggaggtgggagggagtgtgtgaaagagggagtgttgagggtaggggaggtgggggggtgaagtgttgtatttttaggggaggtgttaagtttgtattttggttttttttattttgttgttgtagggtgggagggggttggtgtgggttgatgtttgtagttttttatttttggattattttttttagggtttgggagttgtgtagttttagattttttggttaaggattggtttgggtgttttgaaagtttgtaggattgagttgttagttttttgtggagtgggttgtttataagttagtttttttggtatttattttttgtgtgtaaatttggttgtgagttttttttgaaggtagaagtggttggtatggattgtttttaaggaagtttagttttaggtttagttatttgggttttttttgtttgtttagggatgttgtgagggaagtgattgtgtggattgtttgttattagttgttttttaaatgtgtgtagaatggaggtgaaaggttggtttttttttttttttttgtttgggggtttggaagaaggtaggattttatgaggatattttttgttagttttttagtgggtttgtgaatgtttatgttgagaggggtgtagatggggttaggtgtggaggaaagaagggtttgtggtgttgtaaggtggaggaagtagaggtttgtggtgtgttggggttttgttttgatggtt

SEQ ID NO: 286 - DNA, 3051 bp, Artificial Sequence
  chemically treated genomic DNA (Homo sapiens)
gtatttggtgtagttggtttagattttgtttttgttttggttggtgttgttggtaaaggtgtaggtgtttgtggagttgtatgttattatgtggaagtttgatttggatagtttgttgaaggtttgttttaggaagttgaatttgaggtaatagtgtgaggtgtagtgttttgggggatggttggggttttggtttttgtttagggtgtttttaaatatttttttggttagtgatgtttttttgtaaatggtgatgtgtgttatttgttggaatttggtgtttgtttgtgtgttttgtttgatggtgtaggagttgtggtagttgatggtgatgtagtttgagtgttggttgttgtttagtgattgggatggtgtgagtagtgggtttgttgtgtttttggatggattgtggttagttagttttagtgtgggtgatggtgttttggtagaggtgtttttttgttgtttgggttttgagtagttaagtggtagtagtttgttatttagtgagttttttttgtgtattttgtgttgtgagggtggtggttttgggttgggttgttggggtgttttgaggtggtgtatgagttttggtagtttgaagtatttggttttgtgttgtagttggttgtgtttggggaagtagttgggtagtatgagttgtaagttttgtaggtaatttaggatgtagtggaagaggaagttgttttggtttagaaagaagtggtttttgttgttttgggttagtttttgtggttgttgttgtgtgaatatgtgttagagtagtgagttgggtattgatattattgtgtagtgttgggttatgtatatttggttttttatgtttagttttatgatgttggggaagagtggtggttttgtggaggatgatgaggagttattgttgtttttgttgttgtttttgttgggtaatttatgtgtgttgtttgttagagttatgatagagaggtggttgggttgggatagtggtaggaagttgtgttgtatttaggagttgtaattgttttttttggagttttggaatttggatgtttgtttagttttgtgttttgttgttgttgttgttgttattgttgttattgttattgttgttattttttagagttgtgtggagttgagtggtgtgagtgtgttgttgtgtgtttttttgagttttagtgtgttttgtttgttttgtttgtgtgttttaggtgagtgttgggttgtggtttgtgtgttgtttaagtagagttgtttgttttggtgttgtggtgtgtaggaggtgtgggtggtggtggagttttgtttattgggtgaggggaggtggggagtggggatttgatttgtattttaaatgtggatgttatgtggggttgttggttttattttggtttgtgagtgttgggggtgtttggatttttatttgttttttatttattagttttgttttgtggttttgtttaatttttttttttttttgaagaggatttgtttgagatttggtggttttggaagatagttttttggagggatagttattgtgttttttttttttttgttttagtttgtatttaaggattttggaaggaggatgtgaatttttggaagtttgttgttttgggagtggaaatgtgtggttgtttttggtttttttgtttgtggaattgggtgtttttagtagtgtagttgtggtttgttattgttggttgttgtgttattgaaagtagagagatgtgaaaaatttggagagatgaaagagttgttttagtttgagtgtagttagattttgtttaagttgttttgtagttagtttggaaaataaataaataaatttagaaataaaaagtaaattttagtgttttgtagtaggatgttttatgatagtttattttttggttgtagagataaaatgagatgaagttttaaatttgtttttaattgtaattttttttttttgtagggtttttgaggtattttattttgaagtgaaggggtaagattttggaatgtttggtttttgggttttatttagtttttgttgaattgtgtttttagatttataatagttgtagatttaatgtaatttttaaagttatttttggtgtttgtatgtttatttttttaaaagtttaggtgtttttttttttttgtatgttttggttattttttggttttgtttaagtttttgttagttttagaaagggatatttatatatttgaaggtttttgtttggattttattttttaatttttgttgtttatatgtttgttttttttttttggattgtagtttatagaattgttttttttttttggaagttttttttggttttttaggtgggtggggtttttggatggttttttatatattgtttgtgttgtttttagtatgttttgaaatgttatatttatgagtgattatttgattattgatttgggtatgaaaataagtaagagtttttgaatgttgtaaaaagagaagagtgtagaggagggtgttaagaaatgattgggttattgaatgttttttgtgtatttgttattatttgtagggtattagggagtgaggaatgtaaaggtgaataatttttaaagtgtttttagtgtagtttaataagtaaagggttaggggtttgtgtagttattatattagtttgaagtatagattatatattaggataaattaggtaagatttttgtttttgataaaatttatttttttgtgtaattatttagtgagttttatagtttttttatagataaatgttatttttattttgaaatgtttatatttgtttaataattattgtgtttatgttagtgtgttgaaatgagattaatttttaaattagttattttaattgtaagtatagattttgatattgaatgtattttaatattttttttttgttgttgttttgttttttgggataaataatagataatataaaatttttaagttttagtgtaggattttgaggtggttgtgttattaggtgttatattagtgttagagatttgataaaattagttttttttttataaatttaa

SEQ ID NO: 287 - DNA, 3051 bp, Artificial Sequence
  chemically treated genomic DNA (Homo sapiens)
ttggatttgtagaaaagaggttggttttgttaggtttttgatattaatataatgtttagtagtataattattttgaaattttgtattgggatttggaagttttgtgttatttattatttattttaaagaatagaataataataaaaaaagaatgttgaaatatatttagtattaaaatttgtatttgtaattaagataattggtttgggggttgattttattttagtatattgatatgagtgtggtaattgttgagtagatataaatattttaaaataaaaatgatatttatttgtgaggagattgtgaagtttattgggtagttatatagaaggataaattttattaagaataaagattttgtttgatttattttgatgtgtggtttatattttaaattgatgtgataattgtgtagatttttgattttttgtttattgggttatattgaaagtgttttggagattatttgtttttgtattttttattttttggtgttttgtaaataatagtaggtatataagaaatatttagtgatttaattattttttgatatttttttttgtatttttttttttttgtagtatttaggagtttttatttatttttatatttaaattagtgattagataattatttataaatatgatattttagaatgtgttgggagtagtgtagatagtgtgtagggagttatttagaggttttatttatttgggaagttagggaaagtttttagggggagggggtggttttgtgggttgtagtttgagggggaaaagtaaatgtgtaggtagtaggagttgagagatgggatttagataagggtttttagatatataaatatttttttttgagattgatgggaatttggatagggttgaagagtgattgaggtatgtgggagagaaggggtgtttggatttttggaaggataaatatgtaggtgttaaaggtggttttaaaaattatgttagatttgtaattgttgtgagtttaagggtgtgatttaatgaaggttgaatgggatttggagattgaatgttttggagttttatttttttattttgaagtgaagtgttttgaaggttttgtgggaagagggaattgtaattaagagtagatttgaagttttattttattttgtttttgtagttagaaaataaattattgtaaagtattttattgtgggatattgaggtttgttttttgtttttaggtttatttatttattttttaggttggttgtaaggtaatttgaataaaatttggttgtgtttggattggggtggtttttttgtttttttaggttttttgtgtttttttatttttagtgatatgataattaatgatggtaggttgtagttgtattgttggaagtgtttagttttgtaggtgggagggttggaggtggttatgtatttttatttttggggtgataggtttttgaaagtttatgttttttttttagagtttttgggtgtgggttggggtgagaggggagggggtgtggtgattgtttttttaaggagttgttttttgaagttgttaagttttgggtgggttttttttggaagagggagaaagttgggtgggattatggggtggggttggtgggtggggagtgggtgggagtttgggtgtttttagtgtttgtgagttggggtggagttagtagttttgtgtggtgtttgtgtttaagatgtaaattgagtttttgttttttatttttttttgtttggtaagtgaggttttgttgttgtttatgttttttgtgtgttatggtattagagtaggtggttttatttaagtagtgtgtgggttgtgatttggtatttgtttggagtgtgtgggtaaggtgggtggagtgtattggaatttaagggggtgtatagtggtgtgtttgtattgtttggttttgtgtggttttaggaggtggtggtggtggtggtggtggtggtggtggtggtggtggtggtggggtgtagggttgagtgagtgtttgggttttggggttttggggaaggtggttgtagtttttgagtgtagtgtggttttttgttattgttttggtttggttatttttttgttatggttttggtggatagtatatgtggattatttaatgggggtggtggtgggggtggtagtggttttttgttgttttttgtggagttattgtttttttttgatattgtggagttgaatgtggggggttaggtgtatgtgatttggtgttgtatggtggtgttggtgtttgatttgttgttttggtgtatgtttatgtagtagtagttgtaggagttggtttgggatagtaaaggttgtttttttttggattgggatggtttttttttttgttatattttggattatttgtgggatttgtagtttgtgttgtttgattatttttttgagtgtagttggttgtagtgtgaggttgagtattttgagttgttagagtttgtgtgttgttttggggtgttttagtagtttggtttggggttgttgtttttgtggtgtggggtgtataaggagggtttgttgggtgatgagttgttgttgtttggttatttggagtttgaatagtaggagggtgtttttgttggggtgttgttgtttatgttggagttggttagttgtagtttgtttgggggtgtggtgggtttgttgtttatgttgttttagttgttggatggtagttggtgtttgggttatattattattggttattgtggtttttatattattgggtgggatgtgtaggtggatgttaagttttggtgagtggtgtgtattattgtttgtggaaagatgttgttggttaaggaggtgtttggggatattttgaatgaaagttgggattttgattgttttttggagtgttatattttgtgttattattttaagtttaattttttggagtaggtttttgataagttgtttgagttgggtttttatatggtggtgtgtagttttatgggtatttgtgtttttgttagtagtattgattagagtgaggataagatttggattagttatattgagtat

SEQ ID NO: 288 - DNA, 4722 bp, Artificial Sequence
  chemically treated genomic DNA (Homo sapiens)
atgtgaagtttagtatttttttaagtttttgtttatatataaaaagttatgttttagaggttttatttttaatttaagataagtaggatattttaaaaattatttatttattagttggtttgagaaaatttattgggtatttggagtaaggaggggggggagattttgaaattaaaaaagtaagagaaaataaaggtttagttatgagaagagagatagaaatttatgataatagaggtatttttttagtttaattgtttgttttagttgtgggggttggaggtagggttgtgaggtggtgattgttttgatatttagttgttagataaataaaagaggttgtttggtgttagttttggtgttttgtttttttatgtttgtggttgtagttgttgtgtttggttggtttggttggaaattattggtttggttggagttgtgtattttatagtttatagggtggggggtgattatgttttttttttgtttttggattttagatttagtttttagtaattttggttttttgttttggtttgttttttaggtgtgtaatttatttttgtttttgttggtttgtttggtatttgtgtgggggatatggggttgtttatttttagtgtatttgggagatgtattttaagtgtgttggggaatgtgggggatttgtgggtgtttggggtgaatttttatattatattttgtgtatagagatgtagagtaaaggaaggaatggagaaagttgagaggataaaaggaaaggagttttagggttttagttgagaagtttaggttttagtgtagtaagaggtgataatgttattgaggtgttggggttttattaatttatagatttatttgtgtggaaggaaggaaaaagtaggggatatttaattttttttgtttgtttgtttttttgtattttggggttggtagagttgaaaggagatagatatttagtttggttttttatttaattttttttgttttaaaattttaaaggtgtgtggttatgatagtatttgggttattggtgtttgatgtgattttttgtatttattaaaggagtaaatatggagattttttagtttttatagtatgttttttttagttttttttggtgggtttggattaaatttaatttggttatatattttaatgtttttttgggtgtggggaggtgtgatttttttatttttttttgtatttttttgttgatttggaaatgaaggtgtttaatttttaattgtagattgtaggagtagtgtttgtagatttttttggggtaatataggagaaaatttggaagggaatttttagggaatgttttttgagtttttttttgttttttttttatttttagtttttagtttttttttaggagggtatgtatatttttttaggagggtatgtatatttttttaggagggtatgtatattttttttggagggatggttgtataaatgtattgttttaggggttttttttttagtattggtgttttggaaaatgttgggggtagggggataattttttatttagtttgtagagttggttaaggtgatgggggttgtagtatattagtttggggttgatttttttgtaagatttatagtaatatagttttttgatttttgaggaatgtttgagatttggttatttgaatattttgtatagtaggagggggagtgagtaggatgagggtggttgtgtaggttgtgtgttggtgggtgtttttgggtttagtttgtagtttaggtggttgggtagtaggaggtatgtggtgtgtgttttgttgtgggattttatggtttggagtagtagttttagttgttgtttttttagttttttgagtattgagtgtgtgagtgtttttagatttgttttggtgtttttggttgtgttggtgtttgtggttggtgggtggggatggtggtgatttttggtattttgtattgttttgtttaggtagtatttagttttgtttgggttgttgttattggttttatgtgtttggttgtttgttgttttttttttttgtagtttgtttttttttttatttttttttgtgtttttttttttgtttttgttgttgggtgtatggtttttttagagatgttggatgagtgtagattgtttggttttgaatatgtggggtgaggaggtgaggagaaaagttgtttgtttgttaaggagtgaatatgatttttgtatattatgaagaagttgggtgttgagttggggtagtaggtgtaggtgatagtagtagtagtaggggtttgggtaggagtggtggtggtttgaggggtgttttgtggtatgtgttagttttttggaggttggggtgtgtgtgggggtttgggggtgtttgttggggattgggggtttgtgttttggttgttttattttgtgtggtttgtgttttgtgtggttttttggttttggtgtgttttggaggaatttggttgttgtttttttggggatggttgagtttgtttttgttggtgtttttttaaaaagaggtttttttgtagtggtttttgaatgttgggtttgttagttttggttttttatatggaaggtttgtgggggtaaaaaatgaaaggtgtttggttgggttgttggaagaaggaaaaagttttttttttttttgttaagtaatttaatttgggggtggggagaagtaggtaattaaaaaaaaaaaagtaagtgatttattttttttttttatatttttagtaattggatttttttgaattttgtgtatatgaagatttaggggagggggttgagtggattttattttgtatgagatgtttggtaaaataagaaggtttttgtaaaatttaataattaaatatgtaaagttttaaatgaaaattattatttttttgaattttagaggtttgggggtgtttggttggaattggggtttaaaaaaagaaaatgtttataaagtataataagatgtttgatgggtggaaaaatgtatttatgagttatatttttttgtttttttgtaaagttttgttggttttttttttttttttttttgttaaaaaaaaaaaaaaaaattgtgtatttttttaatttatagaaagttttggttagattgttttaattttgtgtatttgggtggtttaggggagtttttggtttttttttttgtgtttttgggggtttaggtttttggtggggatttttttgaggttggtgtgggtgtaggggtagaagatgttgtggtggtggttgagtttggtggggttgatagtgtgggggagggtggtgtggtggtggtggagggttttagatgggttgtgtgtttttgttttttttgggtataagttgtttgttagtgtaggggttgttgatgtttttttttttggttgtggttggttgttgaggttttttgtatgggttgtttgttttgatttagttgtggtggtaggaggttttggtgtttttttggtgtttttttttttgagattttttttgttgtgtttgggagtttttttgtttttggtttgtttttttttggtgttttggtttttttgttgttgttaggggtttgttgtgttgtatttaggggtttaggggttgggtgtttggtggtttggtgttgatggattggttttgttttgggtagtttttttttgtgtggtgagtggattgagtatggtgtttggttggtttggttggtgtggtttggggataggattttttgtgtgttgagtagtaagtgagtgtgtttggggtttattgttttttgtaaggttttttgtttttgtttttttttttttttttttttttttttttttttttttgtttttagttgttgtagttgtgttgttttttttttgtttttttgtattttttttttggttttttgtttggttggttttattgtgtagtggtgtgtttggttttggttttgttatgtggttgtttagatattttgttgttttaaaaaaaaaaaaaaagtgattgtgttttgtaaataatagattgggtttttaaaagttatttttttttttaattttttgttattgttatttttttttgggtttgtagagggggtattgatggaggggagagagataggtggggggtagagaagtttttagaatggattgagttttggttggagttatggagaaattggaaaagtagggagtattgagtgggttttgttgtgagttttggagttgagtgagtgggttggtggtttgattttgatttggttgggttttgtggtggttattttgtgtgtgtttgttttagtgttttatttattggttttgttttaaaggttttggtggtggattttttggttgtgtttgagggtaaggggaggagagtgttgttttggtttaaaagatatttatattggattggattgaggttttgggaagtgtgtgttgaggggaatagttgttgagggtggggaggtggtgtgaatatgattttagtggtggttgtgtgtttttttttgtttttttagttttgggttttggtttttaggattgtttggagaagtgtgttttgtgtatagttttggaatgtatttggttggttgatgagttgtgaggggtagtattttggtgggagaaggggagtgggggtgggggtttgtttgtgtgttgtgggtaggtttttttttgggtttggaagatttttgttatttgttattttgttttttggtgtgggaaggttatttagtg

SEQ ID NO: 289 - DNA, 4722 bp, Artificial Sequence
  chemically treated genomic DNA (Homo sapiens)
tgttgggtaatttttttgtgttgggaggtagggtggtgggtggtggaggttttttgggtttgggaggaaatttgtttgtggtgtgtaggtgagtttttatttttgtttttttttttttgttgggatgttgttttttatagtttgttagttggttaaatgtattttagagttgtgtataagatatatttttttaggtagttttagaaattggagtttggagttgagagggtgggagggagtgtgtggttgttgttgaggttatatttatgttgtttttttgtttttggtggttgttttttttagtgtatattttttagggttttggtttagtttggtataaatgttttttaaattgagatagtgtttttttttttttgtttttgggtgtggttaagggatttattgttagggtttttaaaataaaattaatgaatgaagtgttagggtgagtgtgtgtgagatggttattgtgaaatttagttgggttgaaattgggttattgatttgtttgtttagttttaaaatttgtggtgaagtttgtttggtgttttttgtttttttaatttttttatggttttggttggggtttaatttattttgggagtttttttgttttttatttattttttttttttttattggtattttttttatagatttgggagggggtggtggtggtggggggttggggggagaaatagtttttagaaatttgatttgttgtttgtgaaatataattgttttttttttttttttaaagtgatagggtgtttagatggttatgtgatgaggttggagttgggtgtgttattgtgtagtggaattagttgagtagagggttggagggggggtgtgggggggtggggaggaggtggtgtggttgtggtggttgggggtgggggagggaagggggaggaagggggagggaagggggtgggggtgggaggttttgtgggaggtggtgagttttgggtatatttgtttgttgtttggtgtatggaagattttgtttttgagttgtgttagttgagttagttgggtgttgtgtttggtttgtttgttgtgtgggagagagttgtttgagatagagttagtttgttggtgttgagttgttgagtgtttggtttttgagtttttgagtgtggtgtggtgagtttttggtggtggtagaaggattggagtgttaggagagggtggattggggataaggaggtttttgggtgtgatgaggagagttttggaggaggaggtgttgagaggatattggggttttttgttgttgtagttgggttgaggtgagtagtttatgtggggagttttggtggttagttgtggttaggggaagggatattggtggtttttgtattagtaagtagtttgtgtttggggggggtgagaatgtgtgatttgtttggggttttttgttgttgttgtgttatttttttttgtgttgttagttttgttgggtttagttgttgttgtagtattttttgtttttgtgtttgtgttagttttgaggaagtttttgttgaggatttgggtttttaggagtgtagggggaaagattagagatttttttaaattatttagatgtgtaggattgaagtggtttagttaaagttttttgtggattaaaaaaatatatgatttttttttttttttttggtagaagaaaaggagaggaagattagtggggttttgtaaggaaatggggggatgtaatttgtggatatatttttttatttattaaatattttgttatattttgtaaatattttttttttttaaattttagttttagttggatgtttttagatttttgaggtttgaggaggtggtggtttttatttggggttttgtatatttggttgttaggttttgtgagagtttttttattttgttagatgttttatgtggggtgaagtttatttggtttttttttttgagtttttgtgtgtgtggaatttgaggagatttggttattaaggatatagaggaaaaaaataaattgtttgtttttttttttttaattgtttgtttttttttatttttaaattaagttgtttagtaagggggaaagaggtttttttttttttttaatagtttagttgaatgttttttgttttttgtttttgtggattttttatgtaggaagttgaggttggtgagtttgatatttgggagttattgtgggggggtttttttttggggaggtgttgatgggggtaggtttggttgtttttagggaagtggtggttgggtttttttggggtgtgttggggttggagagttgtgtagggtgtgggttgtgtggggtggggtagttggagtgtaggtttttgatttttggtgggtgtttttgggtttttgtgtgtgttttggtttttgggagattggtgtatgttatggagtgttttttgggttgttgttgtttttgtttgggtttttgttgttgttgttgttgtttgtgtttgttgttttaatttggtgtttgatttttttatggtgtgtggaggttatgtttgttttttagtaggtaaatgatttttttttttgtttttttgttttgtatgtttaggattaaatgatttgtgtttgtttggtgtttttggaggagttgtgtgtttggtggtgaggatgaggaggagggtgtagggggaggtggaggaggaggtgagttgtggggagaaggggtgatggatagttgagtgtatggggttggtggtggtggtttgggtagggttggatgttgtttgggtaaggtggtgtgaggtgttaaaggttattattatttttatttgttagttgtgggtgttggtgtggttgggggtgttgaggtggatttgaaggtgtttatgtatttggtgtttaagaaattgaaggagtggtagttggagttgttgttttaggttgtggagttttgtggtgggatgtgtattgtgtgttttttgttgtttggttgtttggattgtaggttgggtttgggggtgtttgttggtgtgtagtttgtgtagttgtttttgttttatttgtttttttttttgttgtgtaaagtgtttaggtggttggattttaggtattttttggaagttaagaggttgtgttgttgtgaattttatgggaagattaattttgagttggtgtgttgtaatttttattattttagttgattttgtgaattaggtgagaagttgtttttttatttttaatattttttggagtgttagtgttggaagaaaagtttttagggtagtgtgtttgtgtagttatttttttagggggagtgtgtatatttttttgggagagtgtgtatatttttttgggagagtgtgtatatttttttgggaagagattgggggttgaaagtagagaagggataaggggaaatttaaagggtattttttgggggtttttttttaggtttttttttgtgttgttttgaaggggtttatgggtattgtttttgtagtttgtggttaaaaattagatgtttttatttttggattaataagggggtgtagagggaggtgggggggttatgtttttttgtatttggaaagatgttgaggtgtgtggttgagttggatttggtttaggtttgttaaggaaggttgggagaggtgtgttataaaggttggaaggtttttgtatttatttttttagtaaatatggagaattatgttgaatattagtggtttagatattgttgtggttgtgtatttttggagttttggggtaaagagagttggatggaaggttgaattgggtatttgtttttttttaattttgttagttttagggtgtagaggaataaataggtaggagaagttgggtgttttttattttttttttttttttgtatagataagtttgtagattagtggggttttggtgttttagtgatgttgttgttttttattgtgttggggtttgggttttttggttgagattttgaaatttttttttttttatttttttagttttttttatttttttttttattttatgtttttgtatatagagtgtgatgtgagggtttattttgggtgtttgtagattttttatgttttttagtatgtttgggatgtattttttgagtgtgttaggaatgggtagttttgtgttttttgtgtgagtgttgagtggattggtgggggtagaggtgaattgtatgtttggggggtgggttggggtggggagttgaggttgttgggagttgggtttggagtttgaggatggggagggggtatggttgttttttgttttgtgaattgtgaagtgtgtggttttggttgagttggtggtttttagttgggttagttgagtgtggtggttgtggttgtagatgtggaggagtggagtgttgaggttggtgttaggtggttttttttgtttatttgatagttaaatattaaggtaattattgttttgtggttttgtttttaatttttatagttaagataaatagttgggttaaaagaatgtttttgttattataagtttttatttttttttttatggttgggtttttatttttttttgtttttttaattttagagttttttttttttttttattttagatatttgatggatttttttaaattaattggtgagtagatgatttttaaaatattttgtttattttaagttagaaatagagtttttagaatgtggttttttgtgtgtaggtaaaggtttggggaggtgttgggttttatgt

SEQ ID NO: 290 - DNA, 2146 bp, Artificial Sequence
  chemically treated genomic DNA (Homo sapiens)
aggtttgtgtatttgggtagtttttggttgttgttgttaggttgttttagttggttgttgttgttgtggtgattggtgataagttattagttatttatgatggtttaaggaggtgaagaagagtaagtgattaggatattaaaatggttattggaggtaggtttttagtatattagttggttgagggttgagttttgtgggtggtagtaagttttgggagttggaggtaattgaattaaaaggtgttttagaaattttgttttgggattttgtttagtagggttttgggttggagggtgttgaggtttggtggatgggatagtgggaagagagaaaggtgttaaggggatttaagatttgggatttagaataagagggggtggggaataattttattaagttaaatagatttattttttttgtttttatgttggaaaaatttaggttttatatggttttttgggagggagggagggagatggtggttgttggtttttttttagggttttgttggagaagggagatgagttttttgtaagaattttattttgttaagtatattttagggagagttaggagagtaataatagttggggaagttttgagagaggggataggttattttttaggatttaaaaaaattaatgggagaaagaaaaataataagaaaggaagatagagaaaggttgagatttttttagtagttgtggagaaaatttagttttggatttggttgttgaaagaaaagagagagaggagaaaagaggagagaagtaggaagatagaggggagagagagagggagagagagagagagagagagagggagagagagggagggagggagggagggagagagagagttgttgtgtggaaggaagtttaaagtttgtgaattttttttgaattgagattggagttatatgggttataaattattgagatatattttttgttatttataaattgatagtttattttagtttagtttattttagttattgatgaggggagaataggtagatataatatatatttatattgagttttagagtgagtggtaggtgataaattttttttttttgaaggtaaaggaaaaaaagattattgtttaaagttgtgttgttttttgtttttttgtttttgttttgtaaagttattttggttggggagtttgaggggtagattggttagaggagttgtgtggtgtttgttttaatttatttggtttaggagtaggggtgtgtaggagggagggggtgggggagtgggaaaaaaaatagaagattgaaaggtgttgggtggtttagtttgttagaatttagttttgggttttagtagggttaagttgttatagtgtggttgttttataagattggtatgttttattttttgtaataatggtttttgtttttgtatagggaaaaaaaattatatagatatatatatatatttatttatatataagtttatatttttttatttttttttttttagtaagtttagatgtttgataaggagggaaggtgatggtggtgatggggaaggggggaaattttaaaatatttgtttttttaaaaaaagagtaagaagaaaagaaggagggtttttttttttttttttaaagaataggtaaaaatttaaatttagattggagggatagggaggaagaggtgagtaaaggtaaggaagggtggtgaagtttatagttttttttatattttattagtgaattattatgttaatatgagaagtagtatttggaggttgagttaaaggtaggtttggtttgggggtgagggtgttgggtgtttttttgtatttatttgtaattggaatattaggatttttttagaaagtagttttgggtttttaatttttatattttggttttttttttttgagtttttagttttggttttttttttttattatattttttttattttttttaaatttttttttagtttttaggtttagtttttaattaagggagagggaaagattagaatttaaaaaaaaaataaaaaaaaaatatttttttttttttttttttttgagaatagataataagtggtgagtgatgattttaaaaattttgaatattttgtagggggaggagggttgagaaaagggtgataaaagga

SEQ ID NO: 291 - DNA, 2146 bp, Artificial Sequence
  chemically treated genomic DNA (Homo sapiens)
tttttttgttattttttttttaatttttttttttttgtaagatgtttagagtttttaaaattattatttattgtttgttgtttgtttttaaaaagaaaaagggggaggggtgttttttttttgttttttttttaagttttggttttttttttttttttggttagagattgggtttggagattggagggagatttgggaggaatagagagggtgtagtggagggaagaagttggggttggagatttagaaggagggagttagagtgtgagggttggagatttagaattattttttaaaaaagttttggtgttttaattgtgaatgagtgtagaggggtatttggtatttttatttttgggttaggtttgtttttgatttagtttttaaatattattttttatattagtataatagtttattagtggggtatggggggagttgtgaattttattgtttttttttgtttttgtttatttttttttttttgtttttttaatttagatttaaatttttatttgttttttaaggaaaaaaaaaaaaatttttttttttttttttttattttttttttggggaggtgggtattttaaaatttttttttttttttattattattattattttttttttttattaggtatttaagtttgttaaagggggagaggtgggggggtgtgagtttgtgtgtgagtgagtgtgtgtgtgtgtttgtgtggttttttttttttgtgtaaaagtagaggttattgttatggagagtagggtgtattagttttatagggtaattatattgtggtggtttagttttgttggagtttggagttggattttggtgagttgagttgtttggtattttttggttttttatttttttttttgtttttttatttttttttttttgtgtatttttgtttttaagttgagtgaattgaagtggatgttgtgtggtttttttggttggtttgttttttgggttttttagttggggtggttttgtggggtgggggtgggggggtggggggtgatgtagttttaaatagtggttttttttttttttgtttttaaggaggggagatttgttgtttgttgtttgttttggggtttgatgtgaatatatattatgtttgtttgttttttttttgttggtggttaaggtaagttggattgaaataggttattagtttgtgaatggtggagagtatgttttaatgatttatggtttatatgattttaattttggtttaagaagagtttataagttttaagtttttttttatgtagtgatttttttttttttttttttttttttttttttttttttttttttttttttttttttttttttttttttttttttttttttgtttttttgttttttttttttttttttttttttttttttttttttagtagttagatttagggttgaattttttttgtggttgttaagaaagttttaatttttttttgttttttttttttgttattttttttttttttattaatttttttaagttttggaagatggtttatttttttttttggggtttttttagttattgttatttttttggttttttttggggtgtgtttggtaaggtggggtttttgtggggggtttattttttttttttagtgagattttggggggaagttggtagttattgttttttttttttttttttgaggagttatatggaatttgaatttttttaatatggaggtaagggaaatagatttgtttggtttggtagagttgttttttatttttttttgttttggattttagattttgggtttttttagtatttttttttttttttattgttttgtttgttaggttttggtgttttttaatttggagttttgttgagtaaagttttgaagtggagtttttaaggtgttttttaatttggttatttttagtttttaaaatttgttgttgtttgtggggtttggtttttggttggttggtgtgttgggaatttgtttttgataattgttttggtgttttgattgtttgtttttttttgtttttttgggttattgtaggtggttggtagtttgttgttagttgttgtggtagtagtgattggttgaggtagtttggtagtagtagttagggattatttgggtgtataaattt

SEQ ID NO: 292 - DNA, 17968 bp, Artificial Sequence
  chemically treated genomic DNA (Homo sapiens)
ggtttttggaggttgggatttgtggagggtttagtagtaggaagaaattttaggaggaagaaattttagatagattgttggtgaggtagtgtgggatttagttttaggtgtgtgtggatggtgtgtggagtgagtttttttaaaagtggagtttttgtgatgatgagtataggtttgtttgtgtgtttgtgggttgtttttttattggtggtttttagttgtggagagtagaatttggtagttttaggggttgtttgtgggagggtgttttttgttgtatgtgtgtgtttgttatgggtgtgtgtgtgtgtgtgttgggggggtgtgtttgtgtgtgtgtttgtgtgtgtgtatgtgtagtgtttgtttgtgtgttgatttttgttttttttttatgtttttttttttttttttttttttttttttttgtttttttttttgttttttttgtggttttttttttttgtttttgtttgtttgtgtgtgtgtgtgttttgggatatatgtgttttgtgtgttggagggtgggttttttgtatgttggttttttttttggttagtttttttttgtgtttttgtttgggttgtgtggttggttggtagttgttgttttggtggttttagtttgggggtttgtgaaggtttgggtaatgtgggtattggtgttggatttgtaggggtttttattttttttttatttggagtagtttttttgttaggttggatttagatgagtgttttttaattaaggataatggttttttaggtgtttattgtttatttgtaggagggtgtttgtagagttttaagaaggtggttgttatgtttgttgttttttgtttttattgagaaatgtagttatagtttgatgtagggatggagaaggaagttggtaaggggatggggtaagtatgtttgttttttaaaggttggtttttttggttgagttatttgtttgatatttttttttggatgttggtggtggtggtatggtttttttgtattttgtttgggttttggtttttgttttgattttttttttgttgtgtttgttttgtttttgagaagtttggtggttttttagtgtggtttagtgttttttataaagaagatttttttgtttattagggagaaattttgtggtggtttgtgttatgattgtttttttttttatatttttttttggatgattgggtagttgtggtgattttggagttttgggtttttatatttgtgtgggatagggaagtttttttggtttttatggtttaagtgatggttgtatgtttggtttaggaagaggtggaggtaagtttattgtttttgatattggttttttaggaaaggtggtgttgtattttatttgtattttttttttgatttttgagggttaattgttttttttgtttttggggaaagtgttttttagtattgaattttttggttgttatggatgttagggagttaatgggattgggttttggttgggtgtaggggaggttgtgttaggggtatttagttggtggtgggttgggggtggggtgtattttgtttaaattttttggtttttttggtgggtttttttgaatgtggtgtggatttgtgtataggttttgttttgtaggtttttaggtgtgtttggttttttttttgttttgtggggtaggtttttagtggttttttgggtgtatgtttggatattattgtttgttttgttgttgttttttatggttttaaagatatatgttgtttgtatgtgtttttgggggatgatagtgttatatgtggatatattggttttagtttggatttgtttttgtttttttttgtttgtgttgttggaagttgttttgggttgttggagtttttgggttttggagatgaaggtaggtttttgtttttgttaggaaggagggaggtagtgggtttatgggttggtgtttttgtagttgatagtatgttttgtggttttggggatttttttgtgttttggtgagattttttttgttttattgtattggaattttatttttgattatttgttgggatttattattggattttaagaggagtttgtgtagtttagttggtattttgaagttttttttttagtgggaattgaagtagaagagtgattaaggaggtttttattataggatttttatgggtttgattatgggttttttgtaggtttttttggtagttttttttttatttgttgttttgggttgtgtttttgttgttgttgttgtaatttttagtattgttgttttaggttttgtagttgttgtgttgttgttattttttaaagggtttgtagtttgattttgtggagtaagggggggtggagtgggggagttggttttgttagtgtgtatgtgtgaggtttgagttgttgtttgggttatagtgaaagttattgttgtttggggatgggtttttgatatttggggaagtaggagttttgtgtgattgtgtgtttgagtttgggttgagattagttttggttagggtagttattaggatggtttttggaggttgggatttgtggagggtttagtagtaggaagaaattttaggaggaagaaattttagatagattgttggtgaggtagtgtgggattttagttttaggtgtgtgtggatggtgtgtgggtgagtttttttaaaagtggagtttttgtgatgatgagtataggtttgtttgtgtgtttgtgggttgtttttttattggtggtttttagttgtggagagtagaatttggtagttttaggggttgtttgtgggagggtgttttttgttgtatgtgtgtgtttgttatgggtgtgtgtgtgtgtgtgttggggggggtgtgtttgtgtgtgtgtttgtgtgtgtgtgtgtgtagtgtttgtttgtgtgttgatttttgttttttttttatgtttttttttttttttttttttttttttttttttttttgtttttttttttgttttttttgtggttttttttttttgtttttgtttgtttgtgtgtgtgtgtgttttgggatatatgtgttttgtgtgttggagggtgggttttttgtatgttggttttttttttggttagtttttttttgtgtttttgtttgggttgtgtggttggttggtagttgttgttttggtggttttagtttgggggtttgtgaaggtttgggtaatgtgggtattggtgttggatttgtaggggtttttattttttttttatttggagtagtttttttgttaggttggatttagatgagtgttttttaattaaggataatggttttttaggtgtttattgtttatttgtaggagggtgtttgtagagttttaagaaggtggttgttatgtttgttgttttttgtttttattgagaaatgtagttatagtttgatgtagggatggagaaggaagttggtaaggggatggggtaagtatgtttgttttttaaaggttggtttttttggttgagttatttgtttgatatttttttttggatgttggtggtggtggtatggtttttttgtattttgtttgggttttggtttttgttttgattttttttttgttgtgtttgttttgtttttgagaagtttggtggttttttagtgtggtttagtgttttttataaagaagatttttttgtttattagggagaaattttgtggtggtttgtgttatgattgtttttttttttatatttttttttggatgattgggtagttgtggtgattttggagttttgggtttttatatttgtgtgggatagggaagtttttttggtttttatggtttaagtgatggttgtatgtttggtttaggaagaggtggaggtaagtttattgtttttgatattggttttttaggaaaggtggtgttgtattttatttgtattttttttttgatttttgagggttaattgttttttttgtttttggggaaagtgttttttagtattgaattttttggttgttatggatgttaggagttaatgggattgggttttggttgggtgtaggggaggttgtgttaggggtatttagttggtggtgggttgggggtggggtgtattttgtttaaattttttggtttttttggtgggtttttttgaatgtggtgtggatttgtgtataggttttgttttgtaggtttttaggtgtgtttggttttttttttgttttgtggggtaggtttttagtggttttttgggtgtatgtttggatattattgtttgttttgttgttgttttttatggttttaaagatatatgttgtttgtatgtgtttttgggggatgatagtgttatatgtggatatattggttttagtttggatttgtttttgtttttttttgtttgtgttgttggaagttgttttgggttgttggagtttttgggttttggagatgaaggtaggtttttgtttttgttaggaaggagggaggtagtgggtttatgggttggtgtttttgtagttgatagtatgttttgtggttttggggatttttttgtgttttggtgagattttttttgttttattgtattggaattttatttttgattatttgttgggatttattattggattttaagaggagtttgtgtagtttagttggtattttgaagttttttttttagtgggaattgaagtagaagagtgattaaggaggtttttattataggatttttatgggtttgattatgggttttttgtaggtttttttggtagttttttttttatttgttgttttgggttgtgtttttgttgttgttgttgtaatttttagtattgttgttttaggttttgtagttgttgtgttgttgttattttttaaagggtttgtagtttgattttgtggagtaagggggggtggagtgggggagttggttttgttagtgtgtatgtgtgaggtttgagttgttgtttgggttatagtgaaagttattgttgtttggggatgggtttttgatatttggggaagtaggagttttgtgtgattgtgtgtttgagtttgggttgagattagttttggttagggtagttattaggatggtttttggaggttgggatttgtggagggtttagtagtaggaagaaattttaggaggaagaaattttagatagattgttggtgaggtagtgtgggattttagttttaggtgtgtgtggatggtgtgtgggtgagtttttttaaaagtggagtttttgtgatgatgagtataggtttgtttgtgtgtttgtgggttgtttttttattggtggtttttagttgtggagagtagaatttggtagttttaggggttgtttgtgggagggtgttttttgttgtatgtgtgtgtttgttatgggtgtgtgtgtgtgtgtgttggggggggtgtgtttgtgtgtgtgtttgtgtgtgtgtgtgtgtagtgtttgtttgtgtgttgatttttgttttttttttatgttttttttttttttttttttttttttttttttttttttttttttgttttttttttttttgtttttttttttgttttttttgtggttttttttttttgtttttgtttgtttgtgtgtgtgtgtgttttgggatatatgtgttttgtgtgttggagggtgggttttttgtatgttggttttttttttggttagtttttttttgtgtttttgtttgggttgtgtggttggttggtagttgttgttttggtggttttagtttgggggtttgtgaaggtttgggtaatgtgggtattggtgttggatttgtaggggtttttattttttttttatttggagtagtttttttgttaggttggatttagatgagtgttttttaattaaggataatggttttttaggtgtttattgtttatttgtaggagggtgtttgtagagttttaagaaggtggttgttatgtttgttgttttttgtttttattgagaaatgtagttatagtttgatgtagggatggagaaggaagttggtaaggggatggggtaagtatgtttgttttttaaaggttggtttttttggttgagttatttgtttgatatttttttttggatgttggtggtggtggtatggtttttttgtattttgtttgggttttggtttttgttttgattttttttttgttgtgtttgttttgtttttgagaagtttggtggttttttagtgtggtttagtgttttttataaagaagatttttttgtttattagggagaaattttgtggtggtttgtgttatgattgtttttttttttatatttttttttggatgattgggtagttgtggtgattttggagttttgggtttttatatttgtgtgggatagggaagtttttttggtttttatggtttaagtgatggttgtatgtttggtttaggaagaggtggaggtaagtttattgtttttgatattggttttttaggaaaggtggtgttgtattttatttgtattttttttttgatttttgagggttaattgttttttttgtttttggggaaagtgttttttagtattgaatgttttggttgttatggatgttagggagttaatgggattgggttttggttgggtgtaggggaggttgtgttaggggtatttagttggtggtgggttgggggtggggtgtattttgtttaaattttttggtttttttggtgggtttttttgaatgtggtgtggatttgtgtataggtttttgttttgtaggtttttaggtgtgtttggttttttttttgttttgtggggtaggtttttagtggttttttgggtgtatgtttggatattattgtttgttttgttgttgttttttatggttttaaagatatatgttgtttgtatgtgtttttgggggatgatagtgttatatgtggatatattggttttagtttggatttgtttttgtttttttttgtttgtgttgttggaagttgttttgggttgttggagtttttgggttttggagatgaaggtaggtttttgtttttgttaggaaggagggaggtagtgggtttatgggttggtgtttttgtagttgatagtatgttttgtggttttggggatttttttgtgttttggtgagattttttttgttttattgtattggaattttatttttgattatatgttgggatttattattggattttaagaggagtttgtgtagtttagttggtattttgaagttttttttttagtgggaattgaagtagaagagtgattaaggaggtttttattataggatttatgggtttgattatgggttttttgtaggtttttttggtagttttttttttatttgttgttttgggttgtgtttttgttgttgttgttgtaatttttagtattgttgttttaggttttgtagttgttgtgttgttgttattttttaaagggtttgtagtttgattttgtggagtaagggggggtggagtgggggagttggttttgttagtgtgtatgtgtgaggtttgagttgttgtttgggttatagtgaaagttattgttgtttggggatgggtttttgatatttggggaagtaggagttttgtgtgattgtgtgtttgagtttgggttgagattagttttggttagggtagttattaggatggtttttggaggttgggatttgtggagggtttagtagtaggaagaaattttaggaggaagaaattttagatagattgttggtgaggtagtgtgggattttagttttaggtgtgtgtggatggtgtgtgggtgagtttttttaaaagtggagtttttgtgatgatgagtataggtttgtttgtgtgtttgtgggttgtttttttattggtggtttttagttgtggagagtagaatttggtagttttaggggttgtttgtgggagggtgttttttgttgtatgtgtgtgtttgttatgggtgtgtgtgtgtgtgtgttggggggggtgtgtttgtgtgtgtgtttgtgtgtgtgtgtgtgtagtgtttgtttgtgtgttgatttttgttttttttttatgtttttttttttttttttttttttttttttttttttttttgtttttttttttgttttttttgtggttttttttttttgtttttgtttgtttgtgtgtgtgtgtgttttgggatatatgtgttttgtgtgttggagggtgggttttttgtatgttggttttttttttggttagtttttttttgtgtttttgtttgggttgtgtggttggttggtagttgttgttttggtggttttagtttgggggtttgtgaaggtttgggtaatgtgggtattggtgttggatttgtaggggtttttattttttttttatttggagtagtttttttgttaggttggatttagatgagtgttttttaattaaggataatggttttttaggtgtttattgtttatttgtaggagggtgtttgtagagttttaagaaggtggttgttatgtttgttgttttttgtttttattgagaaatgtagttatagtttgatgtagggatggagaaggaagttggtaaggggatggggtaagtatgtttgttttttaaaggttggtttttttggttgagttatttgtttgatatttttttttggatgttggtggtggtggtatggtttttttgtattttgtttgggttttggtttttgttttgattttttttttgttgtgtttgttttgtttttgagaagtttggtggttttttagtgtggtttagtgttttttataaagaagatttttttgtttattagggagaaattttgtggtggtttgtgttatgattgtttttttttttatatttttttttggatgattgggtagttgtggtgattttggagttttgggtttttatatttgtgtgggatagggaagttttttgggtttttatggtttaagtgatggttgtatgtttggtttaggaagaggtggaggtaagtttattgtttttgatattggttttttaggaaaggtggtgttgtattttatatgtattttttttttgatttttgagggttaattgttttttttgtttttggggaaagtgttttttagtattgaattttttggttgttatggatgttagggagttaatgggattgggttttggttgggtgtaggggaggttgtgttaggggtatttagttggtggtgggttgggggtggggtgtattttgtttaaattttttggtttttttggtgggtttttttgaatgtggtgtggatttgtgtataggttttgttttgtaggtttttaggtgtgtttggttttttttttgttttgtggggtaggtttttagtggttttttgggtgtatgtttggatattattgtttgttttgttgttgttttttatggttttaaagatatatgttgtttgtatgtgtttttgggggatgatagtgttatatgtggatatattggttttagtttggatttgtttttgtttttttttgtttgtgttgttggaagttgttttgggttgttggagtttttgggttttggagatgaaggtaggtttttgtttttgttaggaaggagggaggtagtgggtttatgggttggtgtttttgtagttgatagtatgttttgtggttttggggatttttttgtgttttggtgagattttttttgttttattgtattggaattttatttttgattatttgttgggatttattattggattttaagaggagtttgtgtagtttagttggtattttgaagttttttttttagtgggaattgaagtagaagagtgattaaggaggtttttattataggatttttatgggtttgattttgggttttttgtaggtttttttggtagttttttttttatttgttgttttgggttgtgtttttgttgttgttgttgtaatttttagtattgttgttttaggttttgtagttgttgtgttgttgttattttttaaagggtttgtagtttgattttgtggagtaatggggggtggagtgggggagttggttttgttagtgtgtatgtgtgaggtttgagttgttgtttgggttatagtgaaagttattgttgtttggggatgggtttttgatatttggggaagtaggagttttgtgtgattgtgtgtttgagtttgggttgagattagttttggttagggtagttattaggatggtttttggaggttgggatttgtggagggtttagtagtaggaagaaattttaggaggaagaaattttagatagattgttggtgaggtagtgtgggattttagttttaggtgtgtgtggatggtgtgtgggtgagtttttttaaaagtggagtttttgtgatgatgagtataggtttgtttgtgtgtttgtgggttgtttttttattggtggtttttagttgtggagagtagaatttggtagttttaggggttgtttgtgggagggtgttttttgttgtatgtgtgtgtttgttatgggtgtgtgtgtgtgtgtgttggggggggtgtgtttgtgtgtgtgtttgtgtgtgtgtgtgtgtagtgtttgtttgtgtgttgatttttgttttttttttatgtttttttttttttttttttttttttttttttttttttttttttttttttgtttttttttttgttttttttgtggttttttttttttgtttttgtttgtttgtgtgtgtgtgtgttttgggatatatgtgttttgtgtgttggagggtgggttttttgtatgttggttttttttttggttagtttttttttgtgtttttgtttgggttgtgtggttggttggtagttgttgttttggtggttttagtttgggggtttgtgaaggtttgggtaatgtgggtattggtgttggatttgtaggggtttttattttttttttatttggagtagtttttttgttaggttggatttagatgagtgttttttaattaaggataatggttttttaggtgtttattgtttatttgtaggagggtgtttgtagagttttaagaaggtggttgttatgtttgttgttttttgtttttattgagaaatgtagttatagtttgatgtagggatggagaaggaagttggtaaggggatggggtaagtatgtttgttttttaaaggttggtttttttggttgagttatttgtttgatatttttttttggatgttggtggtggtggtatggtttttttgtattttgtttgggttttggtttttgttttgattttttttttgttgtgtttgttttgtttttgagaagtttggtggttttttagtgtggtttagtgttttttataaagaagatttttttgtttattagggagaaattttgtggtggtttgtgttatgtttgtttttttttttatatttttttttggatgattgggtagttgtggtgattttggagttttgggtttttatatttgtgtgggatagggaagtttttttggtttttatggtttaagtgatggttgtatgtttggtttaggaagaggtggaggtaagtttattgtttttgatattggttttttaggaaaggtggtgttgtattttatttgtattttttttttgatttttgagagttaattgttttttttgtttttggggaaagtgttttttagtattgaatgttttggttgttatggatgttagggagttaatgggattgggttttggttgggtgtaggggaggttgtgttaggggtatttagttggtggtgggttgggggtggggtgtattttgtttaaattttttggtttttttggtgggtttttttgaatgtggtgtggatttgtgtataggttttgttttgtaggtttttaggtgtgtttggttttttttttgttttgtggggtaggtttttagtggttttttgggtgtatgtttggatattattgtttgttttgttgttgttttttatggttttaaagatatatgttgtttgtatgtgtttttgggggatgatagtgttatatgtggatatgttggttttagtttggatttgtttttgtttttttttgtttgtgttgttggaagttgttttgggttgttggagtttttgggttttggagatgaaggtaggtttttgtttttgttaggaaggagggaggtagtgggtttatgggttggtgtttttgtagttgatagtatgttttgtggttttggggatttttttgtgttttggtgagattttttttgttttattgtattggaattttatttttgattatttgttgggatttattattggattttaagaggagtttgtgtagtttagttggtattttgaagttttttttttagtgggaattgaagtagaagagtgattaaggaggtttttattataggatttttatgggtttgattatgggttttttgtaggtttttttggtagttttttttttatttgttgttttgggttgtgtttttgttgttgttgttgtaatttttagtattgttgttttaggttttgtagttgttgtgttgttgttattttttaaagggtttgtagtttgattttgtggagtaagggggggtggagtgggggagttggttttgttagtgtgtatgtgtgaggtttgagttgttgtttgggttatagtgaaagttattgttgtttggggatgggtttttgatatttggggaagtaggagttttgtgtgattgtgtgtttgagtttgggttgagattagttttggttagggtagttattaggatggtttttggaggttgggatttgtggagggtttagtagtaggaagaaattttaggaggaagaaattttagatagattgttggtgaggtagtgtgggattttagttttaggtgtgtgtggatggtgtgtgggtgagtttttttaaaagtggagtttttgtgatgatgagtataggtttgtttgtgtgtttgtgggttgtttttttattggtggtttttagttgtggagagtagaatttggtagttttaggggttgtttgtgggagggtgttttttgttgtatgtgtgtgtttgttatgggtgtgtgtgtgtgtgtgttgggggggtgtgtttgtgtgtgtgtttgtgtgtgtgtgtgtgtagtgtttgtttgtgtgttgatttttgttttttttttatgtttttttttttttttttttttttttttttttttttttttttttttttttttttttgttttttttgtggttttttttttttgtttttgtttgtttgtgtgtgtgtgtgttttgggatatatgtgttttgtgtgttggagggtgggttttttgtatgttggttttttttttggttagtttttttttgtgtttttgtttgggttgtgtggttggttggtagttgttgttttggtggttttagtttgggggtttgtgaaggtttgggtaatgtgggtattggtgttggatttgtaggggtttttattttttttttatttggagtagtttttttgttaggttggatttagatgagtgttttttaattaaggataatggttttttaggtgtttattgtttatttgtaggagggtgtttgtagagttttaagaaggtggttgttatgtttgttgttttttgtttttattgagaaatgtagttatagtttgatgtagggatggagaaggaagttggtaaggggatggggtaagtatgtttgttttttaaaggttggtttttttggttgagttatttgtttgatatttttttttggatgttggtggtggtggtatggtttttttgtattttgtttgggttttggtttttgtttttattttttttttgttgtgtttgttttgtttttgagaagtttggtggttttttagtgtggtttagtgttttttataaagaagatttttttgtttattagggagaaattttgtggtggtttgtgttatgattgtttttttttttatatttttttttggatgattgggtagttgtggtgattttggagttttgggtttttatatttgtgtgggatagggaagtttttttggtttttatggtttaagtgatggttgtatgtttggtttaggaagaggtggaggtaagtttattgtttttgatattggttttttaggaaaggtggtgttgtattttatttgtattttttttttgatttttgagggttaattgttttttttgtttttggggaaagtgttttttagtattgaattttttggttgttatggatgttagggagttaatgggattgggttttggttgggtgtaggggaggttgtgttaggggtatttagttggtggtgggttgggggtggggtgtattttgtttaaattttttggtttttttggtgggtttttttgaatgtggtgtggatttgtgtataggttttgttttgtaggtttttaggtgtgtttggttttttttttgttttgtggggtaggtttttagtggttttttgggtgtatgtttggatattattgtttgttttgttgttgttttttatggttttaaagatatatgttgtttgtatgtgtttttgggggatgatggtgttatatgtggatatattggttttagtttggatttgtttttgtttttttttgtttgtgttgttggaagttgttttgggttgttggagtttttgggttttggagatgaaggtaggtttttgtttttgttaggaaggagggaggtagtgggtttatgggttggtgtttttgtagttgatagtatgttttgtggttttggggatttttttgtgttttggtgagattttttttgttttattgtattggaattttatttttgattatttgttgggatttattattggattttaagaggatattttaagaggagtttgtgtagtttagttggtattttgaagttttttttttagtgggaattgaagtagaagagtgattaaggaggtttttattataggatttttatgggtttgattttgggttttttgtaggtttttttggtagttttttttttatttgttgttttgggttgtgtttttgttgttgttgttgtaatttttagtattgttgttttaggttttgtagttgttgtgttgttgttattttttaaagggtttgtagtttgattttgtggagtaagggggggtggagtgggggagttggttttgttagtgtgtatgtgtgaggtttgagttgttgtttgggttatagtgaaagttattgttgtttggggatgggtttttgatatttggggaagtaggagttttgtgtgattgtgtgtttgagtttgggttgagattagttttggttagggtagttattaggatggtttttggaggttgggatttgtggagggtttagtagtaggaagaaattttaggaggaagaaattttagatagattgttggtgaggtagtgtgggattttagttttaggtgtgtgtggatggtgtgtgggtgagtttttttaaaagtggagtttttgtgatgatgagtataggtttgtttgtgtgtttgtgggtggtttttttattgttggtttttagttgtggagagtagaatttggtagttttaggggttgtttgtgggagggtgttttttgttgtatgtgtgtgtttgttatgggtgtgtgtgtttgtgtgttggggggggtgtgtttgtgtgtgtgtgtgtgtagtgtttgtttgtgtgtggatttttgttttttttttaggtttttttttttttttttttttttttttttgttttttttgtggttttttttttttgtttttgtttgtttgtgtgtgtgtgtgttttgggatatatgtgttttgtgtgttggagggtgggttttttgtatgttggttttttttttggttagtttttttttgtgtttttgtttgggttgtgtggttggttggtagttgttgttttggtggttttagtttgggggtttgtgaaggtttgggtaatgtgggtattggtgttggatttgtaggggtttttattttttttttatttggagtagtttttttgttaggttggatttagatgagtgttttttaattaaggataatggttttttaggtgtttattgtttatttgtaggagggtgtttgtagagttttaagaaggtggttgttatgtttgttgttttttgtttttattgagaaatgtagttatagtttgatgtagggatggagaaggaagttggtaaggggatggggtaagtatgtttgttttttaaaggttggtttttttggttgagttatttgtttgatatttttttttggatgttggtggtggtggtatggtttttttgtattttgtttgggttttggtttttgttttgattttttttttgttgtgtttgttttgtttttgagaagtttggtggttttttagtgtggtttagtgttttttataaagaagatttttttgtttattagggagaaattttgtggtggtttgtgttatgtttgtttttttttttatatttttttttggatgattgggtagttgtggtgattttggagttttgggtttttatatttgtgtgggatagggaagtttttttggtttttatggtttaagtgatggttgtatgtttggtttaggaagaggtggaggtaagtttattgtttttgatattggttttttaggaaaggtggtgttgtattttatttgtattttttttttgatttttgagggttaattgttttttttgtttttggggaaagtgttttttagtattgaattttttggttgttatggatgttagggagttaatgggattgggttttggttgggtgtaggggaggttgtgttaggggtatttagttggtggtgggttgggggtggggtgtattttgtttaaattttttggtttttttggtgggtttttttgaatgtggtgtggatttgtgtataggttttgttttgtaggtttttaggtgtgtttggttttttttttgttttgtggggtaggtttttagtggttttttgggtgtatgtttggatattattgtttgttttgttgttgttttttatggttttaaagatatatgttgtttgtatgtgtttttgggggatgatagtgttatatgtggatatattggttttagtttggatttgtttttgtttttttttgtttgtgttgttggaagttgttttgggatgttggagtttttgggttttggagatgaaggtaggtttttgtttttgttaggaaggagggaggtagtgggtttatgggttggtgtttttgtagttgatagtatgttttgtggttttggggatttttttgtgttttggtgagattttttttgttttattgtattggaattttatttttgattatttgttgggatttattgttggattttaagaggagtttgtgtagtttagttggtattttgaagttttttttttagtgggaatggaagtagaagagtgattaaggaggtttttattataggatttttatgggtttgattttgggttttttgtaggtttttttggtagttttttttttatttgttgttttgggttgtgttgttgttgttgttgttgtaatttttagtattgttgttttaggttttgtagttgttgtgttgttgttattttttaaagggtttgtagtttgattttgtggagtaagggggggtggagtggggggagttggttttgttagtgtgtaggtgtgaggtttgagttgttgtttgggttatagtgaaagttattgttgtttggggatgggtttttgatatttggggaagtaggagttttgtgtgattgtgtgtttgagtttgggttgagattagttttggttagggtagttattaggatggtttttggaggttgggatttgtggagggtttagtagtaggaagaaattttaggaggaagaaattttagatagattgttggtgaggtagtgtgggattttagtttttggtgtgtgtggatggtgtgtgggtgagtttttttaaaagtggagtttttgtgatgatgagtataggtttgtttgtgtgtttgtgggttgtttttttattggtggtttgtagttgtg

SEQ ID NO: 293 - DNA, 17968 bp, Artificial Sequence
  chemically treated genomic DNA (Homo sapiens)
tgtgattatgagttattggtgagagagtagtttatgggtatataggtggatttgtgtttgttattataagggttttatttttggggagatttatttgtatattgtttgtgtatgttagaggttgggattttgtgttgttttgttggtgatttgtttgaggttttttttttttggggtttttttttgttgttggattttttgtgaattttggtttttggagattgttttggtaattgttttggttaggattggttttagtttagatttagatgtatgattatatagggtttttatttttttaagtgttagggatttatttttgggtaatggtggtttttattgtgatttaagtggtggtttgggttttgtgtttgtgtgttggtgaggttgattttttttgttttatttttttttattttgtagagttaggttgtggattttttaaaaaatggtggtgatgtggtggttgtggggtttggggtggtggtgttggaggttgtggtggtggtggtggtggtgtagtttgaggtgatgggtgggaagaggattgttagaggggtttgtgggagatttagggttggatttataggagttttgtggtgaggatttttttgattgtttttttgtttttgtttttgttgaaggaggagttttggggtgttggttgggttgtgtggattttttttggggtttgatgatggattttagtgggtgattgggaatggggttttaatgtagtgaggtggaaagggttttgttggggtataggaagatttttagggttgtaaggtgtgttgttggttgtaaaggtattgatttatgagtttattgttttttttttttttggtaggagtaggggtttgtttttatttttaaggtttgagggttttggtattttgaggtggtttttggtgatatgggtaaagagagatagaggtgagtttgagttggagttagtgtgtttatatgtggtattgttgttttttaagagtatatgtaggtagtgtgtgtttttgaggttgtagggggtgatgatgagatggatagtgatgtttaggtgtgtgtttggggggttattggagatttgttttataaagtggaggaaaagttaagtgtatttgaaaatttgtgagatagggtttgtgtgtgagtttatgttatgtttagggaggtttgttagaggagttgagaggtttggataaagtatattttatttttagtttgttgttggttaggtatttttgatgtaattttttttgtatttagttaaaatttagttttgttggttttttgatatttgtggtagttaaaagatttggtgttagaaggtattttttttaggagtggaggaagtggttggtttttaagaattagagaggaagtgtaggtgggatgtaatattgttttttttagaaggttaatgttaggagtggtgggtttgtttttgtttttttttggattgagtgtgtagttattatttgggttatggagattgagagagtttttttgttttatataggtatggaagtttagagttttaggattattatagttgtttaattatttagaaagaggtgtggagagggaaataagtatgatgtggattgttatgaggtttttttttgatggatggggaagttttttttgtggaagatattgagttatattaagaagttgttaggttttttagagatggggtagatatagtaagagggaggttagagtagaggttagagtttaggtaggatatgggggggttatgttattattattggtatttggggaggagtgttaaatgggtgatttggttaggaaggttagtttttgagagatagatatgtttgttttatttttttgttggtttttttttttgtttttgtgttgagttgtggttatattttttgatgagggtagagggtgataggtgtgataattatttttttgaagttttgtgggtatttttttgtgggtggatgatgagtgtttgggaggttgttgtttttggttggggagtgtttgtttggatttagtttagtaaagaggttgttttggatggggaggggatgaaaatttttgtgggtttgatgttgatgtttatgttgtttaggtttttatagatttttaaattggaattgttgggatgatgattgttaattggttatatgatttaggtagagatgtggggagaggttgattagaagaaaggttgatgtgtaagaaatttattttttggtgtatagggtatatgtgttttgaggtgtatgtatatatagatggatagagatagaaagagagggttatggaaagagtgagaagggagagagagagagagagagagatttgagagagagatagaagtttgtatatagataggtattgtgtgtgtatatatatagatgtattttttttaatatataaatatatatatttatgatgaatatatatgtatagtagggaatatttttttgtaggtagtttttgaagttgttgggttttgttttttgtgattgagagttagtggtgagagagttgtttatgggtatgtaggtggatttgtgtttgttattataagggttttatttttggggagatttatttgtatattgtttgtgtatgtttgaggttgggattttgtgttgttttgttggtgatttgtttgaggttttttttttttggggtttttttttgttgttggattttttgtgaattttggtttttggagattgttttggtaattgttttggttaggattggttttagtttagatttagatgtatgattatatagggtttttatttttttaagtgttagggatttatttttgggtaatggtggtttttattgtgatttaagtggtggtttgggttttgtgtatgtgtgttggtgaggttgatttttttgttttatttttttttattttgtagagttaggttgtggattttttaaaaaatggtggtgatgtggtggttgtggggtttggggtggtggtgttggaggttgtggtggtggtggtgaaggtgtagtttgaggtggtgggtgggaagaggattgttagaggggtttgtgggagatttagggttggatttataggagttttgtggtgaggatttttttgattgtttttttgttttggtttttattgaaggaggagttttggggtgttggttgggttgtgtggattttttttggggtgtttttttggggtttgatgatggattttagtgggtgattgggaatggggttttaatgtagtgaggtggaaagggttttgttggggtataggaagatttttagggttgtaaggtgtgttgttggttgtaaaggtattgatttatgagtttattgttttttttttttttggtaggagtaggggtttgtttttatttttaaggtttgagggttttggtaatttgaggtggtttttggtgatatgggtaaagagagatagaggtgagtttgagttggagttagtgtgtttatatgtggtattgttgttttttaagagtatatgtaggtagtgtgtgtttttgaggttgtagggggtgatgatgagatggatagtgatgtttaggtgtgtgtttggggggttattggagatttgttttataaagtggaggaaaagttaagtgtatttgaaaatttgtgagatagggtttgtgtgtgagtttatgttatgtttagggaggtttgttagaggagttgagaggtttggataaagtatattttatttttagtttgttgttggttaggtatttttgatgtaattttttttgtatttagttaaaatttagttttgttggttttttgatatttgtggtagttaaaagatttggtgttagaaggtattttttttaggagtggaggaagtggttggtttttaagaattagagaggaagtgtaggtgggatgtaatattgttttttttagaaggttaatgttaggagtggtgggtttgtttttgtttttttttggattgagtgtgtagttattatttgggttatggagattgagagagtttttttgttttatataggtatggaagtttagagttttaggattattatagttgtttaattatttagaaagaggtgtggagagggaaataattatgatgtggattgttatgaggtttttttttgatggatggggaagttttttttgtggaagatattgagttatattaagaagttgttaggttttttagagatggggtagatatagtaagagggaggtgagagtagaggttagagtttaggtaggatatgggggggttatgttattattattggtatttggggaggagtgttaaatgggtgatttggttaggaaggttagtttttgagagatagatatgtttgttttatttttttgttggtttttttttttgtttttgtgttgagttgtggttatattttttgatgagggtagagggtgataggtgtgataattatttttttgaagttttgtgggtatttttttgtgggtggatgatgagtgtttgggaggttgttgtttttggttggggagtgtttgtttggatttagtttagtaaagaggttgttttggatggggaggggatgaaaatttttgtgggtttgatgttgatgtttatgttgtttaggtttttatagatttttaaattggaattgttgggatgatgattgttaattggttatatgatttaggtagagatgtggggagaggttgattagaagaaaggttgatgtgtaagaaatttattttttggtgtatagggtatatgtgttttgaggtgtatgtatatatagatggatagagatagaaagagagggttatggaaagagtgagaagggagagagggagagggagagagagagagagagagagagagagagagagatgtgagagagagatagaagttggtatatagataggtattgtgtgtgtatatatatagatatatatatagatgtatttttttaatatatatatatatatatttatgatgaatatatatgtatagtagggaatatttttttgtaggtagtttttgaagttgttgggttttgttttttgtgattgagagttattggtgagagagtagtttatgggtatgtaggtggatttgtgtttgttattataagggttttatttttggggagatttatttgtatattgtttgtgtatgtttgaggttgggattttgtgttgttttgttggtgatttgtttgaggttttttttttttggggtttttttttgttgttggattttttgtgaattttggtttttggagattgttttggtaattgttttggttaggattggttttagtttagatttagatgtatgattatatagggtttttatttttttaagtgttagggatttatttttgggtaatggtggtttttattgtgatttaagtggtggtttgggttttgtgtatgtgtgttggtgaggttgatttttttgttttatttttttttattttgtagagttaggttgtggattttttaaaaaatggtggtgatgtggtggttgtggggtttggggtggtggtgttggaggttgtggtggtggtggtgaaggtgtagtttgaggtggtgggtggggagaggattgttagaggggtttgtgggagatttatggttggatttataggagttttgtggtgaggatttttttgattgtttttttgttttggtttttattgaaggaggagttttggggtgttggttgggttgtgtggattttttttggggtttgatgatggattttagtgggtgattgggaatggggttttaatgtagtgaggtggaaagggttttgttggggtataggaagatttttagggttgtaaggtgtgttgttggttgtaaaggtattgatttatgagtttattgttttttttttttttggtaggagtaggggtttgtttttatttttaaggtttgagggttttggtaatttgaggtggtttttggtgatatgggtaaagagagatagaggtgagtttgagttggagttagtgtgtttatatgtggtattgttgttttttaagagtatatgtaggtagtgtgtgtttttgaggttgtagggggtgatgatgagatggatagtgatgtttaggtgtgtgtttggggggttattggagatttgttttataaagtggaggaaaagttaagtgtatttgaaaatttgtgagatagggtttgtgtgtgagtttatgttatgtttagggaggtttgttagaggagttgagaggtttggataaagtatattttatttttagtttgttgttggttaggtatttttgatgtaattttttttgtatttagttaaaatttagttttgttggttttttgatatttgtggtagttaaaatatttggtgttagaaggtattttttttaggagtggaggaagtggttggtttttaagaattagagaggaagtgtaggtgggatgtaatattgttttttttagaaggttaatgttaggagtggtgggtttgtttttgtttttttttggattgagtgtgtagttattatttgggttatggagattgagagagtttttttgttttatataggtatggaagtttagagttttaggattattatagttgtttaattatttagaaagaggtgtggagagggaaataagtatgatgtggattgttatgaggtttttttttgatggatggggaagttttttttgtggaagatattgagttatattaagaagttgttaggttttttagagatggggtagatatagtaagagggaggttagagtagaggttagagtttaggtaggatatgggggggttatgttattattattggtatttggggaggagtgttaaatgggtgatttagttaggaaggttagtttttgagagatagatatgtttgttttatttttttgttggtttttttttttgtttttgtgttgagttgtggttatattttttgatgagggtagagggtgataggtgtgataattatttttttgaagttttgtgggtatttttttgtgggtggatgatgagtgtttgggaggttgttgtttttggttggggagtgtttgtttggatttagtttagtaaagaggttgttttggatggggaggggatgaaaatttttgtgggtttgatgttgatgtttatgttgtttaggtttttatagatttttaaattggaattgttgggatgatgattgttaattggttatatgatttaggtagagatgtggggagaggttgattagaagaaaggttgatgtgtaagaaatttattttttggtgtatagggtatatgtgttttgaggtgtatgtatatatagatggatagagatagaaagagagggttatggaaagagtgagaagggagatagagagagagagagagagagagagagagagagagagagagagagagagatgtgagagagagatagaagttggtatatagataggtattgtgtgtgtatatatatagatatatatatagatgtattttttttaatatatatatatatatatttatgatgaatatatatgtatagtagggaatatttttttgtaggtagtttttgaagttgttgggttttgttttttgtgattgagagttattggtgagagagtagtttatgggtatgtaggtggatttgtgtttgttattataagggttttatttttggggagatttatttgtatattgtttgtgtatgtttgaggttgggattttgtgttgttttgttggtgatttgtttgaggttttttttttttggggtttttttttgttgttggattttttgtgaattttggtttttggagattgttttggtaattgttttggttaggattggttttagtttagatttagatgtatgattatatagggtttttatttttttaagtgttagggatttatttttgggtaatggtggtttttattgtgatttaagtggtggtttgggttttgtgtatgtgtgttggtgaggttgatttttttgttttattttttgttattttgtagagttaggttgtggattttttaaaaaatggtggtgatgtggtggttgtggggtttggggtggtggtgttggaggttgtggtggtggtggtgaaggtgtagtttgaggtggtgggtgggaagaggattgttagaggggtttgtgggagatttagggttggatttataggagttttgtggtgaggatttttttgattgtttttttgttttggtttttattgaaggaggagttttggggtgttggttgggttgtgtggattttttttggggtttgatgatggattttagtgggtgattgggaatggggttttaatgtagtgaggtggaaagggttttgttggggtataggaagatttttagggttgtaaggtgtgttgttggttgtaaaggtattgatttatgagtttattgttttttttttttttggtaggagtaggggtttgtttttatttttaaggtttgagggttttggtaatttgaggtggtttttggtgatatgggtaaagagagatagaggtgagtttgagttggagttagtgtgtttatatgtggtattgttgttttttaagagtatatgtaggtagtgtgtgtttttgaggttgtagggggtgatgatgagatggatagtgatgtttaggtgtgtgtttggggggttattggagatttgttttataaagtggaggaaaagttaagtgtatttgaaaatttgtgagatagggtttgtgtgtgagtttatgttatgtttagggaggtttgttagaggagttaagaggtttggataaagtatattttatttttagtttgttgttggttaggtatttttgatgtaattttttttgtatttagttaaaatttagttttgttggttttttgatatttgtggtagttaaaagatttggtgttagaaggtattttttttaggagtggaggaagtggttggtttttaagaattagagaggaagtgtatgtgggatgtaatattgttttttttagaaggttaatgttaggagtggtgggtttgtttttgtttttttttggattgagtgtgtagttattatttgggttatggagatttagagagtttttttgttttatataggtatggaagtttagagttttaggattattatagttgtttaattatttagaaagaggtgtggagagggaaataattatgatgtggattgttatgaggtttttttttgatggatggggaagttttttttgtggaagatattgagttatattaagaagttgttaggttttttagaggtggggtagatatagtaagagggaggttagagtagaggttagagtttaggtaggatatgggggggttatgttattattattggtatttggggaggagtgttaaatgggtgatttggttaggaaggttagtttttgagagatagatatgtttgttttatttttttgttggtttttttttttgtttttgtgttgagttgtggttatattttttgatgagggtagagggtgataggtgtgataattatttttttgaagttttgtgggtatttttttgtgggtggatgatgagtgtttgggaggttgttgtttttggttggggagtgtttgtttggatttagtttagtaaagaggttgttttggatggggaggggatgaaaatttttgtgggtttgatgttgatgtttatgttgtttaggtttttatagatttttaaattggaattgttgggatgatgattgttaattggttatatgatttaggtagagatgtggggagaggttgattagaagaaaggttgatgtgtaagaaatttattttttggtgtatagggtatatgtgttttgaggtgtatgtatatatagatggatagagatagaaagagagggttatggaaagagtgagaagggagatagagagagagagagagagagagagagagagagagagagatgtgagagagagatagaagttggtatatagataggtattgtgtgtgtatatatatagatatatatatagatgtattttttttaatatatatatatatatatttatgatgaatatatatgtatagtagggaatatttttttgtaggtagtttttgaagttgttgggttttgttttttgtgattgagagttattggtgagagagtagtttatgggtatgtaggtggatttgtgtttgttattataagggttttatttttggggagatttatttgtatattgtttgtgtatgtttgaggttgggattttgtgttgttttgttggtgatttgtttgaggttttttttttttggggtttttttttgttgttggattttttgtgaattttggtttttggagattgttttggtaattgttttggttaggattggttttagtttagatttagatgtatgattatatagggtttttatttttttaagtgttagggatttatttttgggtaatggtggtttttattgtgatttaagtggtggtttgggttttgtgtatgtgtgttggtgaggttgatttttttgttttatttttttttattttgtagagttaggttgtggattttttaaaaaatggtggtgatgtggtggttgtggggtttggggtggtggtgttggaggttgtggtggtggtggtgaaggtgtagtttgaggtggtgggtgggaagaggattgttagaggggtttgtgggagatttatggttggatttatgagttttgtggtgaggatttttttgattgtttttttgttttggtttttattgaaggaggagttttggggtgttggttgggttgtgtggattttttttggggtttgatgatggattttagtgtgtgattgggaatggggttttaatgtagtgaggtggaaagggttttgttggggtataggaagatttttagggttgtaaggtgtgttgttggttgtaaaggtattgatttatgagtttattgttttttttttttttggtaggagtaggggtttgtttttatttttaaggtttgagggttttggtaatttgaggtggtttttggtgatatgggtaaagagagatagaggtgagtttgagttggagttagtgtgtttatatgtggtattgttgttttttaagagtatatgtaggtagtgtgtgtttttgaggttgtagggggtgatgatgagatggatagtgatgtttaggtgtgtgtttggggggttattggagatttgttttataaagtggaggaaaagttaagtgtatttgaaaatttgtgagataggggtttgtgtgtgagtttatgttatgtttagggaggtttgttagaggagttgagaggtttggataaagtatattttatttttagtttgttgttggttaggtatttttgatgtaattttttttgtatttagttaaaatttagttttgttggttttttgatatttgtggtagttaaaatatttggtgttagaaggtattttttttaggagtggaggaagtggttggtttttaagaattagagaggaagtgtaggtgggatgtaatattgttttttttagaaggttaatgttaggagtggtgggtttgtttttgtttttttttggattgagtgtgtagttattatttgggttatggagattgagagagtttttttgttttatataggtatggaagtttagagttttaggattattatagttgtttaattatttagaaagaggtgtggagagggaaataattatgatgtggattgttatgaggtttttttttgatggatggggaagttttttttgtggaagatattgagttatattaagaagttgttaggttttttagaggtggggtagatatagtaagagggaggttagagtagaggttagagtttaggtaggatatgggggggttatgttattattattggtatttggggaggagtgttaaatgggtgatttggttaggaaggttagtttttgagagatagatatgtttgttttatttttttgttggtttttttttttgtttttgtgttgagttgtggttatattttttgatgagggtagagggtgataggtgtgataattatttttttgaagttttgtgggtatttttttgtgggtggatgatgagtgtttgggaggttgttgtttttggttggggagtgtttgtttggatttagtttagtaaagaggttgttttggatggggaggggatgaaaatttttgtgggtttgatgttgatgtttatgttgtttaggtttttatagatttttaaattggaattgttgggatgatgattgttaattggttatatgatttaggtagagatgtggggagaggttgattagaagaaaggttgatgtgtaagaaatttattttttggtgtatagggtatatgtgttttgaggtgtatgtatatatagatggatagagatagaaagagagggttatggaaagagtgagaagggagatagagagagagagagtgagagagagagagagagagagagagagagagagagagagagagatgtgagagagagatagaagttggtatatagataggtattgtgtgtgtatatatatagatatatatatagatgtattttttttaatatatatatatatatatttatgatgaatatatatgtatagtagggaatatttttttgtaggtagtttttgaagttgttgggttttgttttttgtgattgagagttattggtgagagagtagtttatgggtatgtaggtggatttgtgtttgttattataagggttttatttttggggagatttatttgtatattgtttgtgtatgtttgaggttgggattttgtgttgttttgttggtgatttgtttgaggttttttttttttggggtttttttttgttgttggattttttgtgaattttggtttttggagattgttttggtaattgttttggttaggattggttttagtttagatttagatgtatgattatatagggtttttatttttttaagtgttagggatttatttttgggtaatggtggtttttattgtgatttaagtggtggtttgggttttgtgtatgtgtgttggtgaggttgatttttttgttttatttttttttattttgtagagttaggttgtggattttttaaaaaatggtggtgatgtggtggttgtggggtttggggtggtggtgttggaggttgtggtggtggtggtgaaggtgtagtttgaggtggtgggtggggagaggattgttagaggggtttgtgggagatttatggttggatttataggagttttgtggtgaggatttttttgattgtttttttgttttggtttttattgaaggaggagttttggggtgttggttgggttgtgtggattttttttggggtttgatgatggattttagtgggtgattgggaatggggttttaatgtagtgaggtggaaagggttttgttggggtataggaagatttttagggttgtaaggtgtgttgttggttgtaaaggtattgatttatgagtttattgttttttttttttttggtaggagtaggggtttgtttttatttttaaggtttgagggttttggtaatttgaggtggtttttggtgatatgggtaaagagagatagaggtgagtttgagttggagttagtgtgtttatatgtggtattgttgttttttaagagtatatgtaggtagtgtgtgtttttgaggttgtagggggtgatgatgagatggatagtgatgtttaggtgtgtgtttggggggttattggagatttgttttataaagtggaggaaaagttaagtgtatttgaaaatttgtgagatagggtttgtgtgtgagtttatgttatgtttagggaggtttgttagaggagttgagaggtttggataaagtatattttatttttagtttgttgttggttaggtatttttgatgtaattttttttgtatttagttaaaatttagttttgttggtttttgatatttgtggtagttaaaagatttggtgttagaaggtattttttttaggagtggaggaagtggttggtttttaagaattagagaggaagtgtaggtgggatgtaatattgttttttttagaaggttaatgttaggagtggtgggtttgtttttgtttttttttggattgagtgtgtagttattatttgggttatggagattgagagagtttttttgttttatataggtatggaagtttagagttttaggattattatagttgtttaattatttagaaagaggtgtggagagggaaataattatgatgtggattgttatgaggtttttttttgatggatggggaagttttttttgtggaagatattgagttatattaagaagttgttaggttttttagagatggggtagatatagtaagagggaggttagagtagaggttagagtttaggtaggatatgggggggttatgttattattattggtatttggggaggagtgttaaatgggtgatttggttaggaaggttagtttttgagagatagatatgtttgttttatttttttgttggtttttttttttgtttttgtgttgagttgtggttatattttttgatgagggtagagggtgataggtgtgataattatttttttgaagttttgtgggtatttttttgtgggtggatgatgagtgtttgggaggttgttgtttttggttggggagtgtttgtttggatttagtttagtaaagaggttgttttggatggggaggggatgaaaatttttgtgggtttgatgttgatgtttatgttgtttaggtttttatagatttttaaattggaattgttgggatgatgattgttaattggttatatgatttaggtagagatgtggggagaggttgattagaagaaaggttgatgtgtaagaaatttattttttggtgtatagggtatatgtgttttgaggtgtatgtatatatagatggatagagatagaaagagagggttatggaaagagtgagaagggagatagagagagagagagagagagagagagagagagagagatgtgagagagagatagaagttggtatatagataggtattgtgtgtgtatatatatagatatatatatagatgtattttttttaatatatatatatatatatttatgatgaatatatatgtatagtagggaatatttttttgtaggtagtttttgaagttgttgggttttgttttttgtgattgagagttattggtgagagagtagtttatgggtatgtaggtggatttgtgtttgttattataagggttttatttttggggagatttatttgtatattgtttgtgtatgtttgaggttgggattttgtgttgttttgttggtgatttgtttgaggttttttttttttggggtttttttttgttgttggattttttgtgaattttggtttttggagattgttttggtaattgttttggttaggattggttttagtttagatttagatgtatgattatatagggtttttatttttttaagtgttagggatttatttttgggtaatggtggtttttattgtgatttaagtggtggtttgggttttgtgtatgtgtgttggtgaggttgatttttttgttttatttttttttattttgtagagttaggttgtggattttttaaaaaatggtggtgatgtggtggttgtggggtttggggtggtggtgttggaggttgtggtggtggtggtgaaggtgtagtttgaggtggtgggtggggagaggattgttagaggggtttgtgggagatttatggttggatttataggagttttgtggtgaggatttttttgattgtttttttgttttggtttttattgaaggaggagttttggggtgttggttgggttgtgtggattttttttggggtttgatgatggattttagtgggtgattgggaatggggttttaatgtagtgaggtggaaagggttttgttggggtataggaagatttttagggttgtaaggtgtgttgttggttgtaaaggtattgatttatgagtttattgttttttttttttttggtaggagtaggggtttgtttttatttttaaggtttgagggttttggtaatttgaggtggtttttggtgatatgggtaaagagagatagaggtgagtttgagttggagttagtgtgtttatatgtggtattgttgttttttaagagtatatgtaggtagtgtgtgtttttgaggttgtagggggtgatgatgagatggatagtgatgtttaggtgtgtgtttggggggttattggagatttgttttataaagtggaggaaaagttaagtgtatttgaaaatttgtgagatagggtttgtgtgtgagtttatgttatgtttagggaggtttgttagaggagttgagaggtttggataaagtatattttatttttagtttgttgttggttaggtatttttgatgtaattttttttgtatttagttaaaatttagttttgttggttttttgatatttgtggtagttaaaagatttggtgttagaaggtattttttttaggagtggaggaagtggttggtttttaagaattagagaggaagtgtaggtgggatgtaatattgttttttttagaaggttaatgttaggagtggtgggtttgtttttgtttttttttggattgagtgtgtagttattatttgggttatggagattgagagagtttttttgttttatataggtatggaagtttagagttttaggattattatagttgtttaattatttagaaagaggtgtggagagggaaataattatgatgtggattgttatgaggtttttttttgatggatggggaagttttttttgtggaagatattgagttatattaagaagttgttaggttttttagagatggggtagatatagtaagagggaggttagagtagaggttagagtttaggtaggatatgggggggttatgttattattattggtatttggggaggagtgttaaatgggtgatttggttaggaaggttagtttttgagagatagatatgtttgttttatttttttgttggtttttttttttgtttttgtgttgagttgtggttatattttttgatgagggtagagggtgataggtgtgataattatttttttgaagttttgtgggtatttttttgtgggtggatgatgagtgtttgggaggttgttgtttttggttggggagtgtttgtttggatttagtttagtaaagaggttgttttggatggggaggggatgaaaatttttgtgggtttgatgttgatgtttatgttgtttaggtttttatagatttttaaattggaattgttgggatgatgattgttaattggttatatgatttaggtagagatgtggggagaggttgattagaagaaaggttgatgtgtaagaaatttattttttggtgtatagggtatatgtgttttgaggtgtatgtatatatagatggatagagatagaaagagagggttatggaaagagtgagaagggagatagagagagagagagagagagagagagagagatgtgagagagagatagaagttggtatatagataggtattgtgtgtgtatatatatagatatatatatagatgtatttttttaatatatatatatatatatttatgatgaatatatatgtatagtagggaatatttttttgtaggtagtttttgaagttgttgggttttgttttttgtgattgagagttattggtgagagagtagtttatgggtatgtaggtggatttgtgtttgttattataagggttttatttttggggagatttattttgtatattgtttgtgtatgtttgaggttggattttgtgttgttttgttggtgatttgtttgaggttttttttttttggggtttttttttgttgttggattttttgtgaattttggtttttggagatt

SEQ ID NO: 294 - DNA, 2730 bp, Artificial Sequence
  chemically treated genomic DNA (Homo sapiens)
gtttttatttgtgtgtttatgtgtgtggataaatgtgggaatttggtagtttttaatgttattttgtagagatttttgggttgtgagagagttggggtgtgtggtgggggaggggagggtttgatatttttaggttgagagttaagttttgggggagtggtatgggtgggggtggttggggggaggtggaggatggagtgtgaattagaaagtgtagaggatttttggtttgtgttgtatttgttgtgattagttttagaggtgtgatttgggagggtggatttttttttaatttttattgtttttttttttttttttttttttaaaagatgttttgtgggtagagttgttagtaattttgtggttgtttgtatttggttgtggtggagttgatttttgtttttgtgatagataggggttggggttgagtggttgtttgtttggggtatttgtatgtggggaataaattttttttttttggttttttttgggatttggtgattgttataggttgggattttgtgtggtgttggagttggtagttttgggtgttatggtttttttgaggagtggggagggaggtggttggggggttggtgtgttttttgtgtggggagtgttatgagttgggtgaagggtggtagtgatagttttagtaattgtttttgttggtgttttttgtaggtttttgttaatttgttttgtgtattatgttgatttttggtttgtggaatttgtagtgtagtttttgttgtttttttggtttttgttattttatgtaggattggttttggttgttggggttagtagtttgtgatgtgtttttggggaggtggaattgttgtgtgttttgagtttgggtttagttttttgttttttagttgtgttttgtttttggttgtttagggagtttagtggtgatgagggtattgttggtgttttgttttttttttggttggttgtgttggggtttggtgggtgtttagtagtttggagagtattgttatggttgggtggatgtgtagggtaattattatgagggtttttagtgtttagaggattttgatatgttggatgttattatttgttgtggtttttgtgtgttttgttattgttgtgttgtggttgatgttaggttggagtagggtggttgtattaatgattgttgtgaattggagtatttaggtattattgtgtgtaagtgtggggtttttggggatatatttttgtttgtttaatggtggtggttgtatgtgtgtgtgggaggatgtatagatttaggtaggtttatgtgtttttttgggtttgtgtgttagggggatgtggttgggtgggggaattaagggatgagtgggtggttgtgttttagattatggttttttatttatttgtagttttgttttttgttatttgtggtttttgtgggttggtttgtagggaaagtttgttagggatagtgaggagtgtggggtttgtgtttggtagttggggggaagatagttggagtttttgggagaagggtagtgtgggtaaagttagggtagatttgggttttggtggaggggttgagggtgttttattgtttgtttttgttattttgggagttttgggaagtgttgaatgtagggaattgtgatttttgttgtgtgtttatttgtagttttttagggttaagaaattttagttattttttttttttgttttaatgatagtgtttttaagttatggttttgttttgtagatttttttttaattttttgtattgaattattttttttggtttattttttattgttatgttttttagaaatgtttaggtttttgaggtggagatttagaaataagggttgaaggggtttttttgttttttatttttattttggaaaatatgggttaaatttttgttgattttagagtggaataaattatgattttagtagagaaaatttatattttgaaaaaaagttttttatttgaattggaatattagggaaatgttttagagtttgaggtgagggttttatggttagggaaattggagaagtgggtggagttgagagtgggtgatattttaggattttagagagttgaggtttggagtttgtaagagaaggttgttgggaaagggaagagaggttggagagattattaagggttttttaatggtttttttttgtaaattgataatttagaggataggggagtttgttttttattagtgttttattagagggtgaatgttgggggttaatatttttaatttagaggattttggaagtagttttggagaaaagatgtttagtggaaagtagggaaatttaggtttttttggtttgttagaaaaatatagatttttttttatggttttatttgtttattttgggggatttagttgttttttgggagtaagtgtaattgtttagtttgtagtatgggttttttttgtgttttttatttggtttggatgttagaggatagtagaagggagaggtagtttttatatttattgagtttgggattaggtaaattttgatggattttggttttgttatttgttggtggtgtaatttgggtaagttatttaattgttttggatatttttttttagttttaaagtgggtatattgtttttaaaggagttaagttgttggtgatgtgagagtgtatgaatgttggagtgtagggtttagtaaatggtagttatttatttttgttttgttttgtatgttg

SEQ ID NO: 295 - DNA, 2730 bp, Artificial Sequence
  chemically treated genomic DNA (Homo sapiens)
tagtgtgtaaggtaaggtaaaggtaagtaattattatttattgagttttgtgttttagtatttatatatttttatgttattaataatttaatttttttgagagtaatatgtttattttagaattgagaagaggtatttagagtagttaagtaatttgtttaagttatattgttggtaagtgatagagttaaggtttattagggtttgtttgattttagatttagtgagtgtggagattgttttttttttttgttgttttttggtatttgagttgagtagggagtgtagaggaagtttgtgttgtagattgggtaattgtatttatttttagagggtagttgggttttttagggtgagtgagtgaagttgtggggaagagtttatatttttttaataggttaggagggtttagatttttttattttttgttgagtattttttttttagaattatttttagaattttttagattggaaatgttgatttttaatatttattttttagtggagtattaatggagggtagatttttttgttttttgggttattagtttgtggggaggggttgttggggaatttttaatgatttttttagtttttttttttttttttggtgatttttttttgtgggttttagattttggttttttggagttttggggtgttatttgtttttagttttgtttgtttttttggtttttttggttataaaatttttgttttaagttttaaagtgtttttttgatgttttgatttaggtggaaaatttttttttaaggtgtaaattttttttgttggggttgtgatttattttgttttgaagttagtggaaatttgatttgtgttttttgaagtgagaatagggggtggggaagtttttttgatttttgtttttaaatttttattttgaagatttgggtatttttgaaaggtgtgataatagggggtgggttggagagggtaatttgatgtagagaattgaaaggaagtttgtagaatggggttgtggtttagaaatgttattattaagatagaaaaaaaaagtgattggggttttttagttttgaagggttgtaaatgagtgtgtgataagagttgtgattttttgtatttggtattttttgaagtttttgaagtgataagggtgagtaatgggatatttttggtttttttattaaaatttaagtttattttggttttatttgtattattttttttttgggagttttagttgttttttttttggttattaggtataagttttgtgttttttattgtttttggtaaattttttttgtgggttgatttgtagagattgtaagtggtgggaagtgggattgtaaatgaatagaggattatgatttgaaatgtgattatttatttattttttgatttttttatttggttgtgtttttttggtgtatagatttaggaaggtgtatagatttgtttgggtttgtgtatttttttgtgtatatatgtagttgttgttgttaggtgggtggggatatgtttttgagggttttgtatttatgtgtagtgatgtttgggtgttttagtttgtggtggttgttggtgtagttgttttgttttagtttggtgttggttgtggtgtaatagtagtggagtgtgtaggagttgtagtagatggtagtgtttagtgtgttgaagttttttgggtattggaagtttttgtggtagttgttttgtatgtttatttagttgtggtagtattttttggattgttgggtgtttgttgggttttagtgtagttagttaaggagaaggtaaagtgttagtagtgtttttattgttattgggttttttgggtggttgggagtaggatgtagttggaaagtgaagggttgagtttgggtttagggtgtatagtgattttgtttttttagggatatgttgtaagttgttggttttggtggttgaagttagttttgtgtgggatagtaggggttggggaggtgataggggttgtattatgagttttgtaggttgggagttagtatggtgtgtggggtgagttggtgagggtttgtgggaggtgttggtagaggtagttgttggggttgttgttgttgttttttgtttggtttatagtgttttttgtgtgaggggtgtgttaattttttggttatttttttttttattttttaagggagttatagtgtttggggttgttaattttagtgttgtatagagttttaatttgtggtgattgttgggttttgagaggagttggaggaaaagaatttgttttttatgtgtgagtattttagataggtggttgtttagttttagtttttatttgttataggagtaggagttagttttgttgtggttaagtataaatggttgtggggttgttgatagttttgtttgtaaggtgttttttaaaaaggaagagggaggaggagataatgagggttaagaaagagtttgtttttttggattgtgtttttggagttaattatagtgggtgtggtgtgggttgagggttttttgtgttttttggtttgtgttttattttttgtttttttttggttatttttgtttatgttgtttttttaggatttgatttttaatttgaagatattagattttttttttttttgttgtatattttaatttttttatagtttggaaatttttgtagagtgatgttgagggttgttgaatttttgtgtttatttatgtatgtgggtgtgtgagtggagat

SEQ ID NO: 296 - DNA, 2396 bp, Artificial Sequence
  chemically treated genomic DNA (Homo sapiens)
atttattattttaattattttaggtgtatagattataagtattaattatatttatattgttgtgtaatagatttgtagaaattatttattttgtaaaattgtagttattgaataatagttttttatttttttgttttttgtggtggttttaaatataatgtaatatatattagttgaaaatggaaaaaagaagtatatgaaaatgttaaatgtatagtataaaaaatgaataatagggttattttggttataattttaaatgagaaaatttaaagtaaaataataatttatgatatattatataaaatgtataatttaaaatttttaaaatttaatattaataaaaatatatgtaatatattatataagtatttaataaaattgaatataattatgtttaatttttttaaattgtgaaaaagattttattaatttttgaatatttatgtaaggaaattaagtatatttttttttgaaaaagtttgattttaattttttttttttttttttttttttgagatagagttttgttttattatttaggttggagtatagtggtgtgatattagtttattgtaagttttgttttttgggtttatgttatttttttgttttagttttttgagtagttgggattataggtgtttgttattgtgtttagttaatttttttttgtatttttagtagagatggggttttattgtggttttgattttttgattttgtgatttgtttgttttggttttttaaagtgttaggattataggtgtgagttattatgtttagttagtttgattttaattttaatagataggtgtttttgataattagtttatttttttattgaaattttttttttttttttttaaaaaattttaaatttttaatttttgtttttatttattttttttttgtttttaaaaggaaaggagtgtgtagttttgttgtttgtatattgtttatagtttttggtttggggtagggttttttaggttgtttgggggtttatatgtagtttttggggggttggtgtggggtgaggtttggttggttggggttgttgttaggtgtgttggttgggtagtttttgggagatgaagtgatgtaggtgttttaggtattggttgtagagtttgatgttgttgtgtttggtgttttttatttatagtggttttattgttttggggtagtgtttgtagagtgttagtttgtgtgagaagttgattattttgttttttatgttgtggatgatgagtatgggtgatgtgattttggatatttttttgatgttagggaaggtgttgaagtagtaggttttggtgttggggaaggtgatgtgtatgtttgaggtgagtggtgagtgtagtattattgtggtatatttgtagtgtgaggttaggtttatggtgggtattgtgttgatgttttgtttgtataggatgatgttgtttgggttgatgttgtatttggtggtgttggagtagggttagttgtggtttttgaggtgtgtgtattttttttattagtgggtgtttttgggtttagttttggatgtgattttttagtttttttatttagttaagttagtgggttaggtttaggttttatattagttttgagggttatttttagtttttaatattgtggtggtgggtgaggttagtggttttgttttgttttttggtgttgttgtttattggtgttttttagtaaggatttgtagggattttgtttatggagtgtttttggggtaggggtaggggaggttttggtgtttgttttttttttggttatttttaggtgtatattgggaattgtgtgttttttatattttgaatgttttaggtttttttgtttgggttagaaagttgtttttggtgtattggttaggatagtggatattttttttttttgtagtttttgtttatttttttggttatgaggaatttaggtagttgtgtttttagatgtttttatttaattttggatttttggagtttttatgtttaatgagatgttagtgtaatttaggttagtattgaaggtggtggttgtggaggtggtatttttttttattagtatttttttttgggagtggataagtttttggttattttagtattattagtttttatttagggttatttttatttttaggttattggtgtgtggtttttgatttagttgatttagtattagttataaggtttttttgtatttagttttaattatgtgggatttatttgttattttgtttatgttaggattttataattttttttttatatgttttaggttttgattttaggtagatatttttttgtaaggtaggagtatgggtaggtgtgtgttttttttgtttggtatttggattttattagtagggttgtttttgt

SEQ ID NO: 297 - DNA, 2396 bp, Artificial Sequence
  chemically treated genomic DNA (Homo sapiens)
atggggatagttttgttggtggagtttgaatgttaggtagaggggatgtatatttgtttatgtttttgttttgtaagagggtgtttgtttgggattagagtttggagtgtgtgggaggagagttgtggggttttggtatgggtagggtggtaggtgggttttgtgtggttgggattgggtatgaggaggttttgtaattggtgttggattagttgggttaagggttgtatattaatgatttgggggtgggggtggttttgggtgggagttggtggtgttgaggtggttgaggatttgtttatttttaagggaaggtgttggtgggagggggtgttatttttgtagttattatttttgatgttgatttgggttgtattggtattttattgggtgtggggattttgagagtttaaaattgggtggagatatttggggatatagttgtttgaattttttatggttaagggggtgggtaagggttgtaggaaggaagagtgtttgttgttttggttagtgtattaggaatggttttttaatttgggtagggaggtttgaagtatttaggatgtggggggtatatagtttttagtgtgtatttaggggtgattaggaggagaataggtgttagggttttttttatttttgttttaggggtattttgtaggtgggatttttgtagatttttgttaggaaatgttagtgaatggtagtgttagggaatggggtggggttgttggttttgtttattgttgtggtgttgggggttgggggtggtttttgggattggtgtggagtttgggtttgatttattgatttggttgagtggggagattagagggttgtatttggagttgggtttggggatgtttgttggtgggaagggtgtgtgtgttttggaggttgtggttgattttgttttggtgttgttaggtatggtattagtttggatagtattattttgtatgggtagagtattggtatggtgtttattgtggatttggttttgtgttatgagtgtgttgtggtggtgttgtatttgttgtttattttgggtatgtgtgttgttttttttgatattaagatttattgttttgatgttttttttaatattgagaaggtgtttaagattatgttgtttgtgtttattatttatggtatagaggatgaggtgattgattttttatatgggttggtgttttatgagtgttgttttaaggtggtggagttgttgtgggtggagggtgttggatataatgatattgagttttatagttagtatttggagtgtttgtgttgttttattttttaggagttgtttagttagtgtgtttagtggtggttttaattggttggattttattttgtgttggttttttaggggttgtatgtggatttttgggtggtttaggggattttgttttgagttaggggttgtggatgatgtataggtaatagagttatgtatttttttttttttggaagtaagaagaaaataagtgaaaatggaaattaaagatttaaaattttttaaaaaaagaaaaagaaaattttagtaagaaaataaattggttgttaaaaatatttgtttgttaaaattggaattaaattggttgggtgtggtggtttatgtttgtaattttggtattttgggaggttgaggtgggtagattatgaggttaagagattaagattatggtgaaattttgtttttattaaaaatataaaagaaaattagttgggtatagtggtgggtgtttatagttttagttatttgggaggttgaggtaggagaatggtgtgaatttgggaggtggagtttgtagtgagttgatattatgttattgtattttagtttgggtgatagagtaagattttgttttaaaaaaaaaaaaagaaaaaaaaaattggaattaaatttttttaagaagagatgtatttggtttttttgtgtaaatatttaaaagttaataggattttttttatagtttaaaaaaattaaatataattgtatttagttttattgaatatttatgtggtgtattatatatatttttgttaatattaaattttaaaaattttaaattgtgtattttatatgatatattatagattgttgttttattttgagtttttttatttaaagttataattaaagtgattttattatttattttttgtgttatgtatttaatatttttatatattttttttttttatttttagttagtatgtattgtattgtatttaaaattattataagaggtaggaaaatggggagttgttatttaatagttatagttttgtaagatggataatttttgtagatttgttgtatagtaatgtgaatatagttaatatttatgatttgtatatttaaaatgattaagatggtaaat

SEQ ID NO: 298 - DNA, 4660 bp, Artificial Sequence
  chemically treated genomic DNA (Homo sapiens)
gtgtgtttggggtttttttatagggggtttttgtgagttaggtagtgagggttgtttttgtgttgtagtttagttaggttgtgttggtagaggggattttttaatttgttttggtgtgtggggattttgtttatgttgttttggtttttttggatggggtgtttttttatttttaggttttttggtggtttttgtatttgggtaaaagttgggaggattgggatttgtagtgtgatggtttgttgggtttttgtgtggtggtatagtttgggtttgtttaagtggggttgtagggttaaggggtgtttgtgttatttatgttttaggggagtttgtggtggggttggggttggggtttttaggttgttggggtggtgtgggaattttaagttggggtagttttatttttttagtttgtgtttttggatgtttttgtgtggtaggggtagatgtaaggtattttggtgtttttttaggtgttttaggagttggtgttttggtttgtatttttttgtggtttgttgttggatgagtttttggtgagtttggagtttttgtagtaggtgtaattttttttagaaatggaggttttgggggagttggaggttttggaagaggttgttttgttggaagtattttttagtgaggaagaatattgggttttgttggaggagttttaggatgtggggttgggatggggttgggtggtttggggtagggtggtggttttttttttgtggggaatgtttggttggttatggaggggtgtgtttttgttttgttttttttattgggttgattggtttgggatttttgttttttaggtttaggtttggtgagagattttatatagtggagaattgttatttttttttgggtattttggggattttagagttggtttaggtattagtaggtgggttgtttattgtgtatgtgtgggtttgtgggtagttgtttgggttgtgggagtagtttgggtagagtttttttgtttttttattagtttattttgttgtttgattgttttttttttatttttattttttgtttttggaaaatgtgttgttttttgggttgggtggagatttttgttttgtgaaatattgggttttgtgtagtgtttgggtttgatattgttttggtggtttgttttttttgtgtttttgtgttattgttgtttgtttgtttgggtttttgtagttgtttaggtgttagtatggagtgtttggtggtggaatgtagattttaggtttggtgtatattggggatgttgagtgttttaggtgggagggaaggtgggtagagatggagagaggaatgggagatttagaggggtggaaggatgggtggagggatgttaggagggagggagggaggtagggaggtagggaggtagggaggaatggagggaaagatagagtgatgtagggattgggggtgggtgggagggagttggggatggggggaggaaggtagggaggaaaagtggtttttggtttttgggagtagtgggatttttgttttttgggaaaatggttagtgtttggtgtgggttgagggttgggtttatagttgttgtgttggttggtggggtattatttatttgttttggttttggggtttagggagtgggtggttttttttgggataaaagattgggatttgggttgttgttgggtttttatttgtgtggtttatagattgtatatttttaggttgagttttgtaatgtggtgtgaggttgatagttttggttatggaggagttatatgtaggatgatggaggtgtgattttggtttttgtgtggttttgttttttgtaaggtggtttgttgtttatgtttttttggtttttgaaaggttggttatgttgattgtttgtttttggagttttgtgggtatttggaaatatgtaggggagggtgtaagtttggtatggtgtttttgttttttttgttaggttttaaattggttatattgtagattttttatgttgttgtatgtgggaatttattgttaggttattatgttggggaggtattttttttttggggttttgttttggttttttatgtggaaatgaatgagagttatatgtttgtgtgtgtgagattgttttggtaatggtgatgtttataggtattgttttttttatggagagagggtttggtatatttaagatttttatggaggtttagttttatatttttttttatttttttaggttggtttttttttgttgttgatgtgtgggagtttagagagtggttttttgtttttgtgggatttttggagaggtttggagagttggtttttgaaatgtgtttttttttttttttttttttttttttttttttttttgtttttttggttttattattattattgttattatgtttttttttattattttttttattttatattattattattattattattattattattttgttggttggttttaggttttgatgttttgggttttttttggggtggggtgggttgttttaggggggtttattgttatttatgaaggggtggagtttgtttgtttgtgggtttttataagggtggttggttggttggttggttgtttgggtaggttttttggttgtatttgttgtagtgtatagtttggttgaggtgtatgggagtttgttggtttttttttgtttgtgtttgtttgtgaaattgtggttggggtttattgtgatggtttttttgatatttttggatagtattttttttgtggaagtttggggatgaggatggtgatggagatttgtttggattttgagttaaagtgaggttttgtgagtttgttttgagtggaatttgtatttgggtattgttattagagaatggttggtttaggttattggtattttggagtttagggtttagatttggttttagaatgagaggttatgttagttgaggtagtattggtgggaattttggttttggtttgggagatgtggtttgttagaaggttggtgaaagtggattgttgttattggattttagattgttttgtttttttgagtttttgagaaggattgttttttaggtattgttgtttgggaggagttggttagagagatgggttttttggagtttaggatttagatttggttttagaattgaagggttaggtatttgggatagggtggtagggtgtttgtgtaggtaggtggtttgtgtagtgtggtttttggtgggggttattttgtttttttgtgggttgtttttgtttatattggtgtgtggggaatggggttttttgtattttatgtgttttgtgtgtttggggtttttttatagggggtttttgtgagttaggtagtgagggttgtttttgtgttgtagtttagttaggttgtgttggtagaggggattttttaatttgttttggtgtgtggggattttgtttatgttgttttggtttttttggatggggtgtttttttatttttaggttttttggtggtttttgtatttgggtaaaagttgggaggattgggatttgtagtgtgatggtttgttgggtttttgtgtggtggtatagtttgggtttgtttaagtggggttgtagggttaaggggtgtttgtgttatttatgttttaggggagtttgtggtggggttggggttggggtttttaggttgttggggtggtgtgggaattttaagttggggtagttttatttttttagtttgtgtttttggatgtttttgtgtggtaggggtagatgtaaggtattttggtgtttttttaggtgttttaggagttggtgttttggtttgtatttttttgtggtttgttgttggatgagtttttggtgagtttggagtttttgtagtaggtgtaattttttttagaaatggaggttttgggggagttggaggttttggaagaggttgttttgttggaagtattttttagtgaggaagaatattgggttttgttggaggagttttaggatgtggggttgggatggggttgggtggtttggggtagggtggtggttttttttttgtggggaatgtttggttggttatggaggggtgtgtttttgttttgttttttttattgggttgattggtttgggatttttgttttttaggtttaggtttggtgagagattttatatagtggagaattgttatttttttttgggtattttggggattttagagttggtttaggtattagtaggtgggttgtttattgtgtatgtgtgggtttgtgggtagttgtttgggttgtgggagtagtttgggtagagtttttttgtttttttattagtttattttgttgtttgattgttttttttttatttttattttttgtttttggaaaatgtgttgttttttgggttgggtggagatttttgttttgtgaaatattgggttttgtgtagtgtttgggtttgatattgttttggtggtttgttttttttgtgtttttgtgttattgttgtttgtttgtttgggtttttgtagttgtttaggtgttagtatggagtgtttggtggttaaaagtatatttttgtttgtttttgtttgttttttggttagatttgtgtgtagtgtgtattttgggtgatgtgtaagggagtttgttggtttttttgtgtttttgtttgtttg

SEQ ID NO: 299 - DNA, 4660 bp, Artificial Sequence
  chemically treated genomic DNA (Homo sapiens)
tggatgaataagggtatagagaggttagtgagtttttttgtatgttatttggggtgtgtattgtgtgtaggtttagttaggaagtgggtaaagatagatagaggtatgtttttgattgttaggtgttttgtgttggtatttgggtggttgtaggggtttgggtgggtgggtgatggtggtgtgggggtgtagaggaggtgagttgttggagtggtgttaggtttggatgttgtgtggggtttggtgttttgtgggatgggggtttttatttagtttaggggatgatgtgttttttgggggtggggggtgggggtggggagggggtggttaggtggtggggtgggttggtggagaggtaggagagttttgtttgggttgtttttatagtttaggtggttgtttgtaaatttgtgtgtgtgtagtaggtggtttatttgttggtatttgggttggttttgggatttttgggatgtttaggaaagaatggtagttttttgttgtgtggagttttttattgggtttaggtttagaaggtaggaattttaggttggttagtttggtggagggggtggggtggagatatgtttttttgtagttagttaggtgttttttgtgaaagagaggttattgttttgttttgaattatttgattttgttttaattttgtgttttaaagtttttttagtagagtttggtatttttttttgttgaggggtgtttttagtgaggtggttttttttgaggtttttagtttttttggggtttttgtttttaggagaggttgtgtttgttgtagaaattttgggtttgttaggagtttatttagtagtaggttgtaggggagtgtagattagggtgttggtttttggagtgtttgggagggtgttgggatgttttgtatttgtttttgttgtgtggaggtgtttgggggtgtgggttggggaggtggagttgttttggtttggggtttttatgttgttttggtgatttggggattttggttttagttttattatggatttttttgggatgtgggtggtgtaagtattttttggttttgtggttttgtttgagtgggtttaggttgtgttattgtgtaggggtttggtaggttgttgtgttgtgggttttggtttttttggtttttgtttgggtgtggaggttattgaggagtttgagggtgggagagtgttttgtttggaggagttggggtggtgtaggtgaaatttttgtgtgttggggtaggttgggagattttttttgttggtgtggtttggttgggttgtagtgtgggggtggtttttgttgtttggtttatgaaagttttttgtgggagagttttaggtgtgtagggtatgtggggtgtgggaagttttgttttttatgtgttggtgtgggtgaaggtgatttatgagggagtagggtgatttttgttgggggttgtgttgtataggttgtttgtttgtgtgggtgttttgttattttgttttgggtgtttggttttttgattttgaaattagatttgaattttggattttgggaggtttgtttttttggttagttttttttgggtggtgatgtttggaaagtgattttttttaaaggtttggaggagtagggtggtttgggatttggtgatggtggtttgtttttgttggttttttggtgggttgtgttttttgggttagggttgagatttttgttggtgttgttttagttggtgtgattttttattttgaaattaaatttggattttgggttttggaatgttgatggtttgggttagttgttttttggtggtgatgtttgggtatgggttttgtttaaagtaggtttgtagggttttgttttggtttggggtttaaatgagtttttgttgttgtttttgtttttgggtttttgtggggagggtgttgtttgaaggtgttgggagggttattgtggtgagttttggttgtaattttatggatggatgtgggtagagagaggttggtgggtttttgtgtattttagttggattgtgtattgtggtaggtgtagttaggaggtttgtttggatagttagttagttagttagttgtttttgtaaaggtttatgggtaggtaggttttatttttttatgaatggtggtgagtttttttgggatagtttgttttattttggaagggatttagggtgttgaggtttggggttggttggtggggtggtggtggtggtggtggtggtggtggtgtggggtggggggggtggtgggggagggtgtggtggtggtggtggtggtggggttggagagatgaagaggaagggggagaggggggaggggggaggggggtgtgttttgggggttggttttttggatttttttagggattttgtgggaatgggaagttgttttttgggtttttatgtgttggtagtagggagaaattagtttgggagggtggaggggagtgtggaattgaatttttgtgggagttttgagtgtgttaggttttttttttgtgaaggaggtaatgtttgtgggtgttgttgttgttgggatggttttgtatatgtaggtgtgtggtttttgtttatttttatgtagaagattagagtgagattttagagaggagatgtttttttggtgtgatggtttgatgatggatttttgtgtgtggtaatgtggggagtttgtagtgtggttggtttggaatttggtaaggagagtgaaggtattgtgttgggtttgtatttttttttgtatgtttttgggtgtttgtagagttttgggagtaaatagttggtatggttagttttttgggggttggagagatgtgagtaataggttgttttgtagagggtaaagttatgtggaaattaaaattatgtttttgttgttttgtgtgtggtttttttgtggttggggttgttggttttgtgttgtgttgtagggtttagtttggggatgtgtggtttgtgaattgtgtgggtgaaaatttgatggtaatttgagttttggttttttgttttggaggaaattgtttattttttgggttttggaattggggtgaatgggtggtgttttgttggttggtgtggtggttgtgggtttagtttttagtttgtgttggatgttgattgtttttttggagggtgggggttttgttatttttggaggttgaagattgttttttttttttgtttttttttttttgtttttggtttttttttgtttgtttttagtttttgtgttgttttgtttttttttttgtttttttttgtttttttgtttttttgttttttttttttttttttaatgtttttttgtttatttttttgtttttttaggttttttgtttttttttttatttttgtttgtttttttttttgtttggaatgtttagtgtttttggtgtgtgttgggtttggggtttgtgttttgttgttaggtgttttgtgttggtatttgggtggttgtaggggtttgggtgggtgggtgatggtggtgtgggggtgtagaggaggtgagttgttggagtggtgttaggtttggatgttgtgtggggtttggtgttttgtgggatgggggtttttatttagtttaggggatgatgtgttttttgggggtggggggtgggggtggggagggggtggttaggtggtggggtgggttggtggagaggtaggagagttttgtttgggttgtttttatagtttaggtggttgtttgtaaatttgtgtgtgtgtagtaggtggtttatttgttggtatttgggttggttttgggatttttgggatgtttaggaaagaatggtagttttttgttgtgtggagttttttattgggtttaggtttagaaggtaggaattttaggttggttagtttggtggagggggtggggtggagatatgtttttttgtagttagttaggtgttttttgtgaaagagaggttattgttttgttttgaattatttgattttgttttaattttgtgttttaaagtttttttagtagagtttggtatttttttttgttgaggggtgtttttagtgaggtggttttttttgaggtttttagtttttttggggtttttgtttttaggagaggttgtgtttgttgtagaaattttgggtttgttaggagtttatttagtagtaggttgtaggggagtgtagattagggtgttggtttttggagtgtttgggagggtgttgggatgttttgtatttgtttttgttgtgtggaggtgtttgggggtgtgggttggggaggtggagttgttttggtttggggtttttatgttgttttggtgatttggggattttggttttagttttattatggatttttttgggatgtgggtggtgtaagtattttttggttttgtggttttgtttgagtgggtttaggttgtgttattgtgtaggggtttggtaggttgttgtgttgtgggttttggtttttttggtttttgtttgggtgtggaggttattgaggagtttgagggtgggagagtgttttgtttggaggagttggggtggtgtaggtgaaatttttgtgtgttggggtaggttgggagattttttttgttggtgtggtttggttgggttgtagtgtgggggtggtttttgttgtttggtttatgaaagttttttgtgggagagttttaggtgtgt

SEQ ID NO: 300 - DNA, 2427 bp, Artificial Sequence
  chemically treated genomic DNA (Homo sapiens)
ttttttggggtttgggtggggagttttttttagtaataaatatgagagggatagagaatgttagagagttttttgttgggattgggatggttggagggtattatagtattggttttgaatattgaatggagaattgttatgtaataagaatttgggtatattagatttttgtaggtatttttgggatttatagattgtatatttgatgggtgtttgtaggatgtgaatggtattttggtaatgttaagttttattttagagttatagggtgttttttattaggttatggagttttttgggttatattgtttagggatattttgtaggggaggaaattgttttttttttttttttatgatttttgtatgaattttaattaagaaatattatatttagaattatagtatttatagtgatagtttttagaagattgtaatagtttttttgttatttaaggggtatagatggtgtagttgtttatttgaatgattttttaaatgagtgattattattattttaatttttttagttgtagttttgttataggttattgattataagtgttggtaaagaaattgtttttttaagtattttggtgttttttggagtgatggttatttttagtagttaaattgtattatatttttattttaattttgtgattgttttagtatttttaaaaatataaattgattttttaggaaaaaataaaaaaatgaaaaaattttttattttttttaaatttttggtttaggtttatttgattttttgtaagttgttttttagggtaggttttagttttatttgttgtgtttgtttttttattttattttagttgagtaggtagagtttgtttttggaaatggtttggttatttgggagggaataaataggtattgtttagatttggagttgtaggtagggtttagtaggattttaggtgggtatataggggtttatttggagggatttgaggggtataggttatagttgggagagttttgggtaggtatataggggtttatttggagggatttgaggggtataggttatagttaggagagtatagataagaggtttttgaggttattagggttgatttttattttattttaaggattagggatgtaaaaggattttaataaagatggttatattatttgttgtagaatgagtataaatgttttttttagtttttgaggttggtattggttttgttgatttttttaattttgttatttgtgtagtaggtggtaatagggataggtagatgatatagttggggttagaggatgatgtagagagatttatattagagatttttggggagtgatagagtttttgttttaattttagtgagtgggataggttgagtggggattgagtatgtttagggttagagtgggagggttagttgtgttggtttttaaagaggattttgggaaataaatatttttttatttggtaaggataaattaagtaattgttgagataggtgtttgtgttttaatttaaggttgtttagatagataagtgtttattgttgtattgttttaatagttgttgagatatatttttgtagttgttttagttagagttagggaggttttgggagaatggttttgtttgtttttagtttttttttatttttaggagtttttttttttttttattttaattgatatttttgggttttttatttgtttagagtttgtttagtggggtatttaatggtggataggtgagagaggtgaggggttgggttgttattgtggttaagggagttatggttttttagtttgaatggtttttgtttgaaattaggatataaatatagtattatatatagtagaaatagtttagaaaggttttagtttagatggtattggaataaatagttttttttaagttattttaaaatgaaagttttgggttatttatttttaaagaggattttaggatagttttaggagtttttttatgatatattttatggagaatgtttggttgttgtgtttatttaatgtagttattgaatagaaatttaagagtgttgttttgttagtttgaaattttttttatgtttttagttattagggttttagttaggttagaaataatagaggtagtaggtttttttagaatagtagtgtgaggttttttatagattttttttagtaatattattgttagtggtgaatattataaatagtatttatttaaagtttttaatgtgttttagggatatatggtgaatggagaaatgtttatttaagaaaattatttaagtggtagtaggaatagtaattttgtgatatttgggttataatttgtttttttatttttatgtgataaaagttttatttttagtaggtaattgagaagataggtttttttttttttagtgttattgtagtagtggtgggt

SEQ ID NO: 301 - DNA, 2427 bp, Artificial Sequence
  chemically treated genomic DNA (Homo sapiens)
gtttgttattgttgtagtggtattgggggagagggagtttgtttttttggttgtttgttgggagtagagtttttgttatatggggatggggaagtaggttgtggtttaagtgttatgaagttgttgtttttgttgttatttaggtggtttttttggataagtgtttttttatttgttgtgtgtttttaagatatgttagggattttaagtgggtgttgtttgtaatgtttattattggtagtgatgttgttggagagggtttgtggagagttttatattgttgttttggaagagtttattgtttttgttgtttttgatttggttgaaattttgatggttggaagtatgaagaaggttttaggttggtagagtaatgtttttgagtttttgtttaatggttatattgagtaaatgtagtagttaagtattttttatggggtgtgttatggaggaatttttggaattgttttgaagttttttttagaagtaggtagtttaaaatttttattttaaagtgatttggggaaaattgtttattttagtgttatttgggttggggtttttttgggttgtttttgttgtgtatgatgttgtgtttgtgttttgattttgggtagaagttgtttaggttggagggttatggtttttttggttgtggtgatagtttagttttttattttttttatttgtttattgttgggtgttttattgagtagattttgagtaaatgaggggtttggagatgttagttagggtaaaggggggaaaaggtttttgaagatgagaggaggttgagagtaggtaaggttatttttttagggtttttttggttttagttgaggtggttgtaggaatgtgttttagtagttgttagggtagtgtggtggtgagtgtttgtttgtttgggtagttttgggttgggatgtggatatttgttttggtagttgtttgatttgtttttgttgagtgggagggtgtttgttttttggggttttttttggaagttggtatggttggtttttttattttggttttagatgtgtttagtttttatttagtttgttttatttattggggttggggtgggggttttgttattttttgagggtttttgatgtgggtttttttgtgttgttttttggttttagttgtgttgtttgtttgtttttgttgttgtttgttgtataggtggtaggattagaggggttagtgaggttagtgttggttttgaaggttaagaagggtatttatatttattttgtagtaggtggtgtggttgtttttgttaaaatttttttgtgtttttgatttttaggataaagtaaaagttggttttggtggttttgggggttttttgtttgtgtttttttgattgtagtttgtgttttttaggtttttttagatgagtttttgtgtgtttgtttggggtttttttgattgtagtttgtgttttttaggtttttttagatgagtttttgtgtgtttgtttggggttttgttgagttttgtttgtagttttgggtttgggtagtgtttgtttgtttttttttaggtggttgggttgtttttaaggataggttttgtttgtttagttggagtggggtggagaagtagatgtagtaggtagggttgggatttgttttgaagggtagtttgtaggaggttaggtgagtttggattagggatttgaaggaagtgagaagtttttttgtttttttgtttttttttggagagttgatttgtatttttaaaaatattgaaatagttatagagttaaagtgggagtatgatatagtttagttgttgggaatggttgttattttagggagtgttaaagtgtttaaaagaatagtttttttgttaatatttgtggttagtaatttgtaatagagttataattaggaaaattagagtggtggtagttatttatttaagaagttatttaggtaagtagttgtattgtttgtattttttaagtagtaaagaagttgttatagttttttgaaaattattattgtgagtgttataattttgaatgtaatgttttttaattagaatttatataagaattatgaaaaaaaaaaaagagtaatttttttttttgtagaatgtttttgagtagtgtggtttaggaggttttgtagtttggtgaaaggtattttgtggttttggggtggagtttggtgttattgagatgttatttatgttttgtgagtgtttattgagtgtgtgatttgtgggttttgagggtgtttgtaggggtttgatgtgtttaggtttttgttgtatggtagttttttgtttagtgtttgaaattagtgttgtgatgttttttagttattttagttttaataggaagttttttggtattttttgttttttttatgtttattattggaaagggttttttatttagattttaggaaa

SEQ ID NO: 302 - DNA, 2350 bp, Artificial Sequence
  chemically treated genomic DNA (Homo sapiens)
tagatgtattggtgagattaggttttggttgtgattttgggtttgtattatgatttttgatttttgatttagattataattatgatttggttgtaattttttgatttggattttagttttttagtttttagagtttgtgatttttgattttgatttggattataatttttgattttgaatgtgatttttgagatttaatttgatagtaatatttgattttaattattatttttgatgatagtttttgtttatattttgatagtaattgtgatttttatgattttggttttgaatgtgatttataatttttgaatttgattgtgatatttgattttaattataattattaattatagtattgattataattttgattgtgtgatttttggttttattttttttatagtttttgtttttttttagaattttttttttggaatttggttgggtttataatttttgattttggtttttgatttgaggtagaattttggattttgattataatttttgattttaattggatttagattttagttattaattttgatttatggtttagttgaattttatttaatgattttagtttataatatttgattggttttttgttttagttgatttttgatttttgtttgattttttttttgattttaaaattttggtataggtagtttttagaaatttagatttataggatttgtaattatggtttttggaatttgagaattttggttagttttatttatttttgttatagagtttttttttagtttttaatttatgagattttttattattttttttagatattttattttaaggggattggttgggtgtgttttgagattggattttttttgaatatttttattttttatagatgtggatgaatgtagtttgggtgtttttttttgtggtttttatggttattgtattaatattgaaggttttttttgttgtagttgtgtgttaggttattgggtgttgttgggttggtttgggttttgtgtaggtgagtagtatagggatttgttagagagtttgggagtagggtttgggttttagggtaaagttggttggaaaggtggaggtgggattaaggtgttgtgggaggagtttagaaatttggtattggtgggggtggggttattgtgatgtgggtggagtttgtttgggaggttgggttttgtgattttgtttaattttttgtgtattttagatgtgaatgagtgtttggagggtgatttttgttttttttatggtgagtgttttaatattgatggtttttttgtttgtatttgtgtttttggttattgatttggattttgtggagttttttgttttggtttgtatttgggttgattttggttttggaaagggtgggtttagggtaggaaaaggtgggatggggagaagagggtgaaaaggggaaaatgagtttttagttggggtattttagtaggattagggggtagttggtgggagttttgaggtagtgagggggggtggggtgtggagatgaaagggttgagtttgggtatttggattgtgattgtaaagaagttgttttaaatttgttggggggtggtgtttgtagggagggaagtagtgtgaggtaggttggggaaggtgtgagaggtttaggagagttgaggggtggtggaggggtgtggtttagaatgttaggtggagtgggaggtgggttgggtttttggatgttttgttttgtagatgttgatgagtgtagtgaggaggatttttgttagagtggtatttgtattaatattgatggtttttttgagtgtatttgttttttgggatattgtgttggtttggattttgttttttgttttggtgagaggttttgttttggtttgattttttttttttttgattttttgatttgttgattggttttttatttttgtttttttttttttgttttttttttttttttattttttttttttgtttttttttttagtttttttaatttttttttattttaatttttttttgtttttttttttgtttttttggttttttttttttgattttttttttttttttttgtattttttattttgtttttttgttttttatatttgattatttgatttttttttttagatgtggatgaatgttgtgagtgaggtttagttttgtgtgggttgtagtgttgtgagaatttttttggtttttattgttgtgtttgggattgtgattttgggtattatgtgggttttgagggtatttgtgatggtgagtttgtttttatttgtttttgttagtgtttgtaatgtggtgttggaggttgtttttttggggattgaggaggggtgttttg

SEQ ID NO: 303 - DNA, 2350 bp, Artificial Sequence
  chemically treated genomic DNA (Homo sapiens)
tagggtgtttttttttagtttttaagggagtagtttttagtattgtgttgtaagtgttagtgaaggtgggtgggggtaggtttattgttataggtgtttttggggtttgtgtggtatttaggattgtagttttggatatagtggtaggagttgggagagtttttatagtgttgtgatttgtatagggttgggttttgtttgtgatatttgtttatgtttgaggagagaggttgggtggttggatgtgggaagtagggaggtaagatgggggatataaagaggggagaggagagttagaagggggaggttggggaagtagaggagagggtaggagaagattggggtagaggagagttggggaggttaggagaggaggtgggggaaagaggtaaggggaggggagaagtggaggaggaaagatagaggtgggaggttaattggtgagttggggagttgaagggaggagggattaggttggggtggggttttttattgaggtaggaggtgaggtttgggttagtgtggtgttttggaggatagatgtatttgaaggagttgttggtgttggtatagatgttgttttggtaaaggttttttttgttgtatttgttaatgtttgtgggatagggtgtttgaaggtttggtttattttttgttttgtttaatattttaggttatatttttttattgttttttggtttttttaggttttttatgttttttttaatttgttttatgttatttttttttttgtaaatattgttttttgatgggtttagaatagtttttttataattatggtttaaatatttagatttggtttttttatttttatgttttgtttttttttattgttttgagatttttattagttgttttttgattttgttggaatattttggttaaaaatttgtttttttttttttgtttttttttttttgttttgtttttttttgttttaagtttattttttttggggttaggattagtttgggtatgaattgaggtaagaggttttgtggggtttgggttggtagttaggggtataagtataggtaaaggagttgttagtgttgaggtatttgttgtgagggaagtagaaattgttttttaggtatttgtttatgtttagggtatgtgggagattgggtggagttatgggatttggttttttagataagttttgtttatattgtagtaattttgtttttattaatgttaggtttttaagttttttttatagtgttttggttttgtttttatttttttagttggttttgttttggaatttaggttttatttttagattttttggtgggtttttatgttgtttatttgtgtagggtttgggttgatttgatggtgtttggtagtttggtgtgtagttgtagtggaaggagtttttggtgttagtgtagtggttgtggggattatagggaggggtatttgaattgtatttgtttatatttgtggggggtgggggtgtttagaaagggtttagttttgggatatatttgattaatttttttggagtagggtgtttgggggaggtggtgggaagttttatgagttggaggttgggggagggttttatggtagaggtgggtagggttgattaaggtttttgggttttggggattatggttgtaagttttgtgggtttaggtttttaggaattatttgtgttaggattttggagttaggagagggattagatagggattagaaattaattagggtaagggattagttaagtattataaattaggattattggatgggatttggttgagttatgggttagagttagtgattggaatttgaatttagttaggattagaagttatagttagggtttagaattttgttttaagttaggggttagggttagggattatgaatttaattaggttttagagaagggattttgagaagaggtaggggttgtgaaagagataggattaagagttatatagttaaggttatggttagtgttatggttagtggttatgattagggttaaatgttatagttaaatttaggagttataggttatatttagggttagagttatgagggttataattgttattagggtatgggtagggattattattaagggtgatggttagggttaaatgttattgttaagttgggttttaggagttatatttagggttaagagttgtggtttaggttagggttaggagttataggttttggggattgagggattgaggtttaggttaggaggttatggttaggttatagttgtgatttgggttaagggttgggggttatgatgtaggtttaaggttatagttagggtttggttttattagtgtatttg

SEQ ID NO: 304 - DNA, 2475 bp, Artificial Sequence
  chemically treated genomic DNA (Homo sapiens)
gttataaaaaggttaatagataagtattttttaagtaataaagttttttttattatatgttataggagttattgagtgtttttgtaaagaaaattagtattataaagtagtaaattataagtgatgtaaatattattttttgtagaaatttataggaagggaagttaggtagaggtatgtttttatgttagtaggtggggatataaattttttttttgttatttttttagaagaaagttagtaatagagattaagagtgtaaaaaaaaaagaaaagaaaaaagaaaaaaaaaattattttgatttaataattttatttttaagaatgtatttttaggaaaaaaaattagatatttgtttaaggatttttgttgaattttttttataaggttattatattattaaatagaaataattgaaatagttaagttgggttatattatgggatatgtttatgatggtattatatttaagtgatgtttttgaagtatggtagtgatttttggaaaaggtttaatatattattttaatgagatgtgtaaatttattattatgatatattaggagaaatgttttgatagatgaagtgggaataattgggagagtgaatgatggagtgttaggaataggggtatatgagttgggttttttaggttgtggaggtgtttttgggtggaagagaaggagggattaagtggagagttttaagttttgaagataattgggaaggtaatatattttttaagaagggtatgtagtagttatattttttatttgttatggttagtaaatttattgtgttttttggagtgagttgggttattaagatgggtggtgtttttttgttggggaagaggggtttggtgggaatttttgttttaaggtttggtagtaatgtttttatgttgttttgggttgtaggtttgttaagttttttgtttttgtttttttgtgtgtgaaataagttttagggttaatgtggtttttttatttagtgtttttgggggtgttaaaaaatgatttgtttagatttttagtgttgatgttgtgtataagtgtagttaattgttggatttggttggtgtgaagttttatatttaaaaggatgaagggtatttatttggtttaagagaatgatttttaggtaaagggttagatttaggtgaggagttggtatagggttagaggtgttttgtatatttagagttttttttttgagttttttgttttgtttggtttttttgggttgtaggtgtttattttgttttttggggttttgttgttttttttttgttaggttttttttatagtaatgtttttttttttttttttttagtttttgagtttttttttttttttttttattgttttatttttgagggatagaagtggggtggtttgagagtaggagattggagggaagaagtaagtttaggtttagttgtaagtattttttatttttgtttttgtttttgtttttgtttttgttaggttttaggatatttgatttttgttaggttttatatggtttggtttgaagtgttttttttttaatagttgtggattggtgaggtttaatggtttatgtttgtaattttaggattttgggaggttgaggtgggtggattatttgaggttaggagtttaagaatagtttgattaatatggtgaaattttgtttttattaaaaatatagaaaattagttgggtgtggtggtgtgtatttgtaattttagttatttgggaggttgaggtaggaaaattgtttgtatttaggaggtggaggttgtagtgagttgagattgtgttattatattttagtttgggtaataagagtaaaaaattttgttaaaaaaaaaaaaaagaagaagaagttgtggagttgtttgatttttgattttgtttgtttaggttggggttgttttggttttttaaatttagtagtgagtttggatagatttagaggtgtttattttaggtaataggagttttagataaaattaggttttttttttggtttagatttttttttgtttataatatttttaggatgtgggatatttagaggtttgtgtagttggaggatgttgggaaatgtgaggagaagatgttttttttttaaaattggaatttttttgattatttgaatttttttgttagttataaattttatttatttttattttatttttgtttttttgttattgtttatttgtttaatttttgaaggtagtgagttttttgttattggaagtgtattttttggtatttttatttgtagaagtttttatagatgttgttttttttttggtttagattatgtttattgtgaaggaagtagtatattggttgtttaaaagtgagatgagtttttatgtagtgttggattttaagaagggtgttttatttgaagattttaaaaaattttataggtttagattttagttttttattgatttttggaatttttttttta

SEQ ID NO: 305 - DNA, 2475 bp, Artificial Sequence
  chemically treated genomic DNA (Homo sapiens)
taagggggaaattttaaggattaataaagggttgaggtttgaatttgtaggattttttgaagtttttaggtgaggtgttttttttaagatttagtattgtatagaggtttattttatttttggatagttggtgtgttgttttttttatagtagatatgatttgagttagaggagaagtagtatttgtgagaatttttataagtaagggtattgagaagtgtatttttagtgataggaaatttattatttttagggattaggtaggtaaatgatgatagaaggataaggataagataagagtgagtgggatttgtggttagtaggagaatttaggtgattagaaagattttaattttaaggaggaaatattttttttttatattttttagtattttttagttatatagatttttagatattttatattttagaggtgttgtaagtagggagaggtttaagttaggaaaagagtttgattttgtttagagtttttattatttggagtaaatatttttgggtttgtttaagtttattgttgggtttgaaagattagggtggttttagtttgaatggataggattaggaattagatagttttataattttttttttttttttttttttttgatggagttttttgtttttgttgtttaggttgaagtgtaatggtgtgattttggtttattgtaatttttattttttgggtgtaagtgatttttttgttttagttttttgagtagttgagattataggtgtatgttattatgtttggttaattttttgtgtttttagtagagatagagttttattatgttggttaggttgtttttgaatttttgattttaggtgatttatttattttggttttttaaagttttgagattataggtgtgagttattgagttttgttgatttatagttattaagagagaaatattttagattaaattgtgtgaggtttaatagaagttaagtgttttagagtttggtgggggtgggggtgggggtgggggtgggggtggggagtgtttgtagttaggtttggatttgttttttttttttagttttttgtttttaaattattttatttttgttttttagaggtgggatagtggggagaggaggaagaggatttagaggttggagaaggaagagaaaaggtgttgttgtgggaaagatttggtaaggaaaaggtagtggaattttagagagtagggtagatgtttgtggtttaggagaattgagtaaggtaaggagtttaaagggagagttttgagtgtgtagggtatttttggttttgtgttgattttttatttgggtttggttttttatttgggagttgtttttttaagttaggtgggtgttttttatttttttgggtgtgaaattttatattggttgggtttagtagttgattgtgtttgtgtgtagtgttgatgttgagggtttgggtaggttgttttttggtgtttttggaagtattgggtggggaggttatattggttttgggatttattttgtgtgtagggaagtgagagtggagggtttagtaggtttgtggtttaaggtagtgtaggagtgttgttgttaggttttggggtagggatttttattgagttttttttttttagtaggagggtattatttattttgatggtttaatttattttaggaaatataatgggtttgttgattgtggtggatgagaggtatggttgttgtatgttttttttaagaggtgtgttatttttttagttgtttttaggatttagggttttttgtttggttttttttttttttttatttggaaatatttttataatttggaagatttaatttatatgtttttgtttttgatattttattatttatttttttagttgtttttattttgtttgttaaagtattttttttagtatattgtaatgatgagtttgtatgttttattaaaatgatgtattgagttttttttaaaagttattattgtgttttaaaaatgttatttaaatatgatgttattatgagtatgttttataatgtaatttaatttggttgttttagttgtttttatttgataatataataattttataaggaaaatttaatagaaatttttgaataaatgtttaatttttttttttaaggatatatttttagaagtggaattattgggttgaaatgatttttttttttttttttttttttttttttttttatgtttttgatttttattgttaatttttttttggaaaggtagtagaaggaggatttgtatttttatttgttggtatgggagtatgtttttatttggtttttttttttgtgagtttttataggaggtagtgtttgtattatttataatttattattttgtagtgttggttttttttgtaagagtatttaatggtttttgtaatatgtagtagaaaaagttttgttatttggaaaatgtttatttgttaatttttttgtagt

SEQ ID NO: 306 - DNA, 3190 bp, Artificial Sequence
  chemically treated genomic DNA (Homo sapiens)
gggttggtgggtattgagttggggttattatgtttttttagagtgtttgtggaggtggtgaaggtttggagagtatatgaggtggaatttggattgagtgagttttttgagttgtttgtgtgggatgtagggagagggtgaataatgtttttaggtgttgaatgtaggggtaaggagttagtgagggtggttggagtaggttttgttagttgttattaagtttttttataggtttgggggtttggggttttttggaaagatttttttgttgtgttgattagtatggggtttgtttttgtattttgaaggttgttgtggttttttgttatttataattaagtttaagattaaggttgtaagttgaggttggggtattgataatgggaatgaagttataggggaagaggataattgggatgggttggatttatatttgatatttgggaaatttttagagtgtgtggtgtttttgttagtggtagttattggtggagttgaggttattgttattgttgttgttggtgttttgtttttggaattttttagtaagatggtatttattgtttgtttttttttgattagtatttttagttgtgtttttttttttttgggatatgtattagttatatattgtggggagaagatgggttatgtaaatgtaagttaatgtgtttttttagttatttttgtataatgtaataggaatagtgatttgtgtgtatgaattgggtagtgtgtgtgtgtgtgtgtttgtgtgtgtgagtgtgtgtgttagtgtgtgtttttgtgtgggtgtgtgtttgggtggatttttgtgtggtttgggaggtaaattgggtgtttttttaagttgttttaatatgatttaggtttttaaatatgtgaaagtggtagatataatagggatgtgaaggaaataaaaaataattggggaagtggtgttaagttatttaggttttgaattgaggatgagtagtgtggttgtgtttggggtgtgtttggaaattatttttagtttgtggtggttattgttttatttaaatttttttgtggggagagttgagtggatttttggggggttggttttgggttagttttaaattttttggttgtattttgtgtggttttattgatggtgtgttttggtgtagtttttggtgtgggtttgtttttttttttttgtttagatttagttttattggatttgttataatatgatagtaatttattggaggtaggaagagtagtatgaaataagatgagaaaattaaaaatatttttttttttttaaatagagatgtgtatttagttttttttatttgtttgtttgttttttatattattttttaatttttggaaagagattgtgaagtggaaatgttgtttgtatagaaattaggttttttagttgttaagattgttttttaatttttaggttgaatttttttttgtttgttgtaatttatggggaaatttaataatgtttttgttagaagtagttaggttgaaggaagaaagtgggggtgtttaaattaattttattaaattttggattatttttttagttaaagttatttaaggtggtttaggatgagggaattagtgatggggtgaggagtggggggtatattattaaggttgtttgtatttgaaataatgttattttggttgagaggtttgttgtattttattttttaattttatattttgattattttttagtgtttaagtaatagatttttttttttggtagtatattattaagtaggtatggggaattttttttttagggtttagatggtgatattatttttaaggattggtggtaggaatggtatgtgttgggtagatagagagaaggttagggtggtatttgttgggttagttaggtgttttttaattttttttagagaggatagggttaaaagttaagtttgattttgttttttggaaattattgggtagtagttgtgttttttaagtattttttaaattagaaaagtaggagggattttgggagagagggagggaatgagggagggagagaaagagggttttaggagtggagtgtgttagagtgtgagggatggagggagaggaggagtgtgggagttgtggaggtgattttgtgaatttattattgtaaatatatttgggggtgttaggaggggtaggggtgggggttgtggtgtttatattagtttggttgtgttggattgaggtagtagtgtggtttgagtagtttttagatttatgttgggtgggtgtagtatttggagtgagttttgtgtttgtttttgtgtagtgttgtatgtttggttttgagttgtttgtatatatgtgttggaggagagtttgtttagtttttttgttgagttttgggattttttaaatttgaggagttttggtgttgtggggtagttttttgttgttttttttgtttgttgtattttttttggggtttgttggtttggtgaagtggagagggggaggtggaggaggagagaaggtgggggttgtggtggttgaagttaagagaaagtggtatgtttgaattttggaggtggtggtggtggaggatgggggaagatgatgttgtagttttgtaggggatgtaggtgagagtaagtgaggtgagttgggtgttttggttttggtttgttgtggggaggtgtgtgttgttttgaggttttggtttttgtatttttgtgttttgatgttgtgggtgatagggtttggttttagtagttgttgttgttgttgttgttgttatttggaggatttagtaaaagtttggatttgggggagggtgtggtgttgagtgggattattattagggttggaaggagattttgagaatttttgtaggtaatgtgtgtttttaattttttttttttatgttttgttgttgtgtttttgtttttttttagagttttttttggtttttgtgggtttggtagaaagtaagagggaggtgaagtttaagattttggggatgagtattgagtgttggtagattattagttatgttagaggggtagttgtgttgagaggtaaatttttttaggagtgggtgagaatttttagttttagttggtgttttattttgtagttttttggaaatttggaatgtgaatttaggggtttttagtattttttagtttagagaaatggtttatggattttattt

SEQ ID NO: 307 - DNA, 3190 bp, Artificial Sequence
  chemically treated genomic DNA (Homo sapiens)
aagtgaaatttatgaattatttttttggattgaagaatattaaaagtttttggatttatgttttaaatttttaaagagttataagatgaggtattagttggggttgagggtttttatttatttttgggggaatttgttttttagtatagttgtttttttaatgtgattagtgatttgttagtgtttggtgtttatttttgggattttgaattttgttttttttttattttttgttagatttgtgagggttaggaagggttttgggaggaagtgggagtgtagtggtggggtatggaagaagagggttgggggtgtgtgttatttgtaaaggtttttgaggtttttttttagttttggtggtaattttgtttagtgttgtgtttttttttagatttaaatttttgttgggttttttgggtggtggtggtggtgatggtggtggttgttggagttaagttttgttgtttgtagtgttggggtgtgggggtgtggaggttggagttttagagtggtgtgtgtttttttgtagtgggttggggttggggtgtttagtttgttttgtttgtttttgtttatgttttttatggagttgtggtattgtttttttttgttttttgttattattgtttttagggtttgggtatgttatttttttttggttttggttgttgtgatttttgttttttttttttttttgtttttttttttttgttttgttaagttaatgaattttaaaagaagtatagtgagtggggaaggtggtagaaagttgttttgtggtgttggagttttttggatttggaggattttgggatttggtgggagagttaggtgggtttttttttgatgtgtgtgtgtggatagtttggagttgggtgtgtggtgttgtgtgggggtgggtgtagggtttgttttaagtgttgtgtttgtttggtgtgggtttggaggttgtttagattatattattgttttaatttgatgtggttgggttaatgtaggtgttgtggtttttatttttattttttttgatatttttggatatgtttatagtaatgaatttgtgggattgtttttgtagtttttgtgttttttttttttttttgttttttgtgttttggtgtgttttgtttttggagtttttttttttttttttttttatttttttttttttttttggagttttttttatttttttggtttaaagaatgtttgggaggtgtggttgttatttagtgatttttaagaggtaaagttagatttggtttttaattttgttttttttgaaaagagttgaagagtgtttggttaatttggtagatgttattttgattttttttttatttatttggtatatgttgtttttattattagtttttagggataatgttattatttgaattttgaaaggagaattttttatatttgtttaatggtgtattgttaagagggaggatttattatttagatattgagaaatgattgaaatgtgagattagagggtaaaatatagtaaattttttaattaaaatggtgttattttaaatgtaggtaattttggtgatgtgttttttattttttattttattattagtttttttattttggattattttaaatgattttaattgggggagtaatttaaaatttaataggattaatttaaatatttttattttttttttttaatttggttgtttttggtaagagtgttgttaaatttttttatagattgtagtggataaagaaagatttagtttaaagattaggaaatagttttgatagttaagaagtttgatttttgtataggtaatgtttttattttgtagtttttttttaaaggttaaagggtaatgtaaaaaataaataaataagtaaaaaaagttaggtgtatgtttttatttaggaaggaggagatgtttttggtttttttattttattttgtgttgttttttttgtttttagtaagttgttgttatgttgtaataagtttggtgaggttgaatttgaatagaagagggagaatgagtttgtgttaagagttatgttgagatgtgttgttggtggggttatgtgagatgtaattggagagtttaaaattagtttaggattaattttttagggatttgtttaattttttttgtagaagagtttaagtggggtagtggttgttataggttgaggatgatttttggatgtgttttaggtgtgattgtattatttgtttttagtttaaagtttgagtgatttggtattatttttttaattgttttttattttttttgtatttttgttgtgtttattgtttttatgtatttgagagtttaaattatgttaagatgatttggagaaatgtttgatttgttttttaagttatgtaaggatttatttagatgtatgtttgtgtggagatgtatgttggtatatgtgtttatatatgtgagtatatatatgtgtatattatttggtttgtgtgtgtgggttgttgtttttgttgtattatgtaaaggtggttgggaaagtgtgttgatttatatttatatagtttattttttttttatagtatgtgattaatatgtattttggggaggagggagtgtggttgggggtgttaattggaagggaatagatagtgagtgttattttgttgggaggttttagaagtaaagtgttaatgatgatagtagtggtggttttagttttattagtaattgttgttggtaggagtattatatgttttaggagttttttgggtattaagtatgggtttagtttgttttagttattttttttttttatggttttatttttgttgttagtattttgattttagtttgtaattttgattttgggtttgattataaatgatgaaagattgtggtagtttttaaagtgtgggagtgagttttgtattggttagtgtggtggagggatttttttaggaggttttaagtttttaagtttgtggagagatttggtaatagttggtaaggtttgttttagttatttttgttggttttttgtttttgtatttagtgtttgagggtgttatttgttttttttttgtgttttatgtaagtggtttaaggaatttatttgatttggattttgttttgtatgttttttaagtttttgttatttttgtaggtgttttagaaaggtgtgatggttttagtttagtgtttgttagttt

SEQ ID NO: 308 - DNA, 3016 bp, Artificial Sequence
  chemically treated genomic DNA (Homo sapiens)
tttttttttttttttggtagaattgtttgatggttttgattatgtttaggtttattttgatgtagtagtaggtatggttggtttggggtttgggatagtttgttatgtagtagtaatagttttttagggtgttgatttttttatatttggtttttttatataggtggttgaagtgattgaatagattgtttaggagatttattagggtgtgggtagatttgttggtatttattttggtgaagtttatgatatttgtaaataaaatattgatttttttgatttgttgtattttaaaagggtggaaggttataggagttttttggatggaagattttttttttttgtttttggggtttgaggtggtatgttttttgatagaatttttattttttttatttttttgttttattaagttattggttatgatttttggtattatggaatgaattattttttttttgagggttttttttatttttaggttttttttgtgtataatggattgttttattttgaggaaggtgtttttggattttatttgggatatgatgaataggtggattttgatggtgtggatgtagttgtggagtagttttttgtttagtagtttttagtgtagggttttggttttgggtgaggggaagtaggttttattttggaaatggtagttaaaggttttgaaaaggatagagtaggttatttttagatataaatttaggtataaaggtaagtgtatgatggtatagagtaaaaagagtattttgatgtatatggagaagttttttatttgagataagtaagtatttgtgggttgggttgtggttgtaaggttggagttgttgttgtgttttgagataggtgttaagatttggaattgtgtagttagggttagggtgaatattagtagggtgagagttagtgaggtttatgtgtaatgttgggtgtatagtttggtgaaggtaaatagaaagaagtttatatatattaggaggaagtatagtgtgggggtgattatgatgattagtttggattttatgtggattgtaaaatagatgttttatagaaggtaggtgaagttgatgtagaagagtgtatattggaattggtgttgggtttgtgggaagtagtgttttaggtaggttttttttaggtttattgagttgaatttggggttttattagtggttggaggtttttttgaatagttggggtagttttttttgtttgtgtagttggtttttgttgtttatttgttgggggatgtttttggagtttttagagttgttgtagttagaggagatgttgtatttgtagtgtttggggtggttgttggaggatagttgtttggggttgattttgatgtgtatgttgttgttgtttttgttggagttgtagtttattttggtgttgtggtgatgtagtagttgttggtggggtggggaagttatgttgttgagttttggggtttgttttggttggggttattagtatttgttagtaaaatggggagagttagtggtgtttttatttaggtatgtatgtttagaggtttgggatttgtttttgttttaaggggtggttttagtatgtgatttggataggtattatttgtttttgtggtttttggtttagtggtgtttttattgtttttattgtttttatttttgaggtgtatgagaattgtttgggatggatttagaatgtttgggggtttttgttgtgtggttgttgtggttttgggattgttttgtttgtttgttttttgtgttttttgttttgagggtggtttttgtgttgtgtggttttttttttttgtgtgtttgttttttttagttgtggttttggagggaagtttagattttgagtgtttttagttttgtgagttgtttgtgtataaataattttgttggtggtgtggagttttttattttgtaggagttgtgttttgatgtgttaaaggtggtgtgtggttggttttgggtttggattttgatttggagtagtgagttttggtgggtgtttttggtttgtgttttttggttgttttttgtgttttgggttggttttgtttgtggtggtgggtgttgggggtgggggtgttttgggttgtgagtgtgtggagtttgttggtgtggtttgtttagtggggtttgtttttttttgagtgtgttgttgtttttgttgtggttgtagttgttttgggattgagtgtgtggaattatggatgtgggttttttgttgggtggtggtgtagatgttgttgtagagttgggtttttgtgatgttggttgggatgtttgtttgtttgtgtttatgttgggggttgtttttttgagttagagatgtggttgttgttgtgtttgttgttgtgttttttgtggttgttgttttatgttggaagagttgttgttgttattatttttggtttttgttttgtttgttgttattgatagatgtgtgtttgtgttgttttttgtttagttgtagtgtgtatgtgtggtttgtgtttgttgttattgttttttggttttggatatgtgtatgggttgtgtgttgttttgttttggtgtgtgtgttgggttggggttgtggggtggggtggggtggggtggggtgtgtgtttggttttgttttttgttttgggtggtgttgtttttaggtggtgggttgtggttgttgtttgtgttttgggtgttgtgggtttgtttttttttggtgttttagaggttgtgtgttgtttggggttttgattttgtggagagatttgaaggtgtttgttgtggaagaagttgttggttgtaatgtttgggaaattaaaatgttgtttttttatttggtatgtttttgggataaattgaagtttttaattgttggattttttttttgggaggttttttttgttttgtaagtaatgaatgtgggttttggggtatttggtttgttttggatttgtttatggggtgatttttatgggtttagtttttaaagttgggtttattgatgattatgtttttttg

SEQ ID NO: 309 - DNA, 3016 bp, Artificial Sequence
  chemically treated genomic DNA (Homo sapiens)
tgggggaatgtggttgttggtgggtttagttttggaggttaggtttgtgaaggttgttttgtgagtaggtttagggtaggttgagtgttttggggtttgtatttattgtttatagagtaaggggagttttttgggagggaaatttaatggttggaaattttgatttattttaaaggtgtgttgagtgggaaggtaatattttgattttttaaatgttgtggttagtggttttttttatggtaggtgtttttaggtttttttgtagggttgggattttgggtggtgtgtggtttttgggatgttgagggagggtgggtttatagtgtttggagtgtggatagtggttatagtttgttgtttagaagtggtgttgtttggggtggggggtggagttgagtgtgtgttttgttttgttttgttttgttttgtagttttagtttagtgtgtgtattaaggtggggtggtgtgtggtttgtgtgtgtgtttggggttaggaggtggtggtggtgagtgtgggttgtgtgtgtgtgttgtggttgggtgaggggtggtgtgggtgtgtgtttgttagtgatagtgggtggggtaggggttggagatggtggtggtggtagtttttttgatatgaggtagtggttgtgggggatatggtggtgggtgtggtggtggttgtatttttagtttggggaggtggtttttggtgtgggtgtgggtgggtgggtgttttggttggtgttgtgggagtttggttttgtggtagtgtttgtattgttgtttggtgaggggtttgtgtttgtggttttatgtgtttggttttgggatagttgtggttgtggtgggagtggtggtgtatttggggggaagtaggttttattagatgggttgtgttgatgggttttgtgtatttgtagtttggggtgtttttatttttagtgtttgttgttgtgggtagggttggtttggagtgtggggggtggttggggagtgtgagttgggggtgtttgttgaagtttgttgttttgggttggggtttgggtttggggttggttgtgtgttgtttttgatgtattggagtgtggtttttgtaggatggagggttttgtgttgttagtggagttgtttgtgtgtaggtggtttgtggggttgggagtgtttaaggtttgaatttttttttggagttgtagttggaggaggtgagtgtgtgaggaggagaagttgtgtggtgtggaggttatttttggggtgagaggtgtggaaggtgagtgagtaaagtggttttggagttatggtggttatgtggtggggatttttgggtgttttaggtttgttttgagtggtttttgtgtgttttgaaggtgggggtggtgggggtggtgggagtattgttgagttgggaattataggaatagatggtgtttgtttaggttgtgtgttggagttgttttttaggataggagtaggttttgggtttttaggtgtgtatgtttaggtgggagtgttgttaattttttttgttttgttggtaggtattggtgattttggttggggtaggttttgggatttgataatatggtttttttattttattagtagttgttgtattattatagtattgaggtgagttgtgattttagtggggatagtaatagtgtgtgtgttaagattaattttaagtagttgttttttaatagttattttaagtattgtaaatatagtattttttttagttgtagtagttttggggattttgggggtgttttttggtgagtgggtggtggaggttggttgtgtaggtagaagaagttgttttagttgtttgagagggtttttagttgttggtgggattttaagtttgatttggtgaatttggaggaggtttgtttggagtgttgttttttgtagatttagtgttggttttggtatgtgtttttttatattggttttgtttgttttttgtggagtatttattttgtggtttatatgagatttagattgattgttatggttgtttttgtgttgtgtttttttttggtgtgtgtgggtttttttttgtttatttttattaagttgtatgtttggtattatgtgtggattttgttggtttttattttgttggtgtttgttttgattttggttgtgtagttttaggttttgatgtttgttttaggatgtggtgatagttttaattttatggttatagtttggtttatagatatttgtttattttaagtggggagtttttttatgtgtattgaagtgttttttttgttttatattgttatgtatttatttttgtatttgagtttgtgtttgggggtggtttattttgttttttttgagatttttggttattatttttgggatgaagtttgtttttttttgtttggagttggggttttgtattgggagttgttgagtagggggttgttttatggttgtatttatgttattggggtttatttgtttgttatgttttaggtgaggtttaggagtattttttttaaggtggggtaatttattatgtatgggaaggatttggaagtggaaaaagtttttaaagagaggatgatttattttgtgatgttaagaattatagttgatgatttaatgaagtagggagatgaggagagtgagaattttgttaagaggtatgttattttgagttttaagaataggaagaaaaagttttttatttaaaaagtttttatagttttttgtttttttaagatgtagtagattgaagaagttagtattttatttgtagatattgtgggttttattaagatgagtgttaataagtttgtttatgttttggtgggttttttgaatgatttgtttggttgttttgattgtttgtgtgaggagattaagtgtgagaaaattagtattttgggagattgttattattgtgtggtgggttgttttgagttttgggttgattatgtttattgttgtattgagatgggtttgggtatgattaaggttattgagtagttttgttaggagaagaaggaga

SEQ ID NO: 310 - DNA, 2497 bp, Artificial Sequence
  chemically treated genomic DNA (Homo sapiens)
tgaagattgtgtggagtgggaggtttgtgtttattttttttatttattggggaatgggttgagtggttgggggtaaagtgggatttaggggttttgtttagtttttattgtaggttaagtttttttttgtggttaagagttattgggttttttatttttttttggtttttatttgtagatttagatggttttatggtgatttagaggaggatgtatttgggtgttttttttgaggatggttgtagggattatttagggattgagttgaggtgtagatatagttatggatttgggtgttgttagatatagaagggtgtgtagtaaagtgagttttatgtatgtgtagattttttttttggtttttgttttttatggaaatataattgattatattatgattgattatggtagttttttagggtttttttttttttttttttttttttttttagaagttataaagggatatagaatatatttaaagattattttatgtttttagtggagaggtaaaaaaggtttgttttggaatggggaagtggttgtgttttggatggagaggggtggggattttgtgattgtaggtggagggagggtgggtgttgttggtgtaggtggtgatagggagatattgttgttattgagtatttttatgtaagtttttttatttttttgtgtattagtgtttatattggggtaatgataaatgttgtgttgaaaaattatttgatggggttatggaaggaatggaaggaatggtgttttggtttgtttggggtttgtgtatgttgttattaagttgtgggggtgggttggaggggagagttgtgttagttaggttgttgttagatgatgagtttggggtgtgatggggtggagtatttttaaaaaagtgtatgtttaggattttgtttagtgtatttttgtgtgtggtgggttgggttgggtagttttataaatagttgtggtgtgagttttgaagggaattattagtgttttttgtttatggagttttaggtttataatggtagtggttgttagttttgtgttttttttgtgttttttgtttttgtatttgttgtttggttggttttgggtaggatgggttggtgagtttggggatgtagtttaagtagggtgggggttaaatttgggaggttgtggattgtagtgggttttagaggaggggaggtttttggaaggattggtgtgatttttttgaatgaatattgtggtttttttgaatgttgtggtttttttgaatgttgtggtttttttgaatattgtggtgtttttgaatattgttgtttttttgaatattgtgatttttttgaatattgtgatttttttagatatgtttagttgaaggtatttagttttttttggtggtttttttttgttgggtttgttttttgtggttgttgtttgttttttaggttaggaggtttttggaaggattggtgttgtttttttgaatattgtggtttttttgaatattgtggtttttttgaatattgttttttttttgagtaatgtgatttttttgaatattgtggtttttttgaaaattgtgatttttttgaatattgttattttattgaatattgtgattttgttgaatatgtttggttgaaggtatttagtttttttttgtggtttttttttgttgggtttgatttttgtggttgttgtttgttttgtaggttaggaggtttttggtagtattggtgtgatgtttttgaatattgtgttttattttaatattgtgatttttttgaatattgtgattttttttgaatattgttgtttttttgagtaatgtggtttttttgaatattgtggtttttttgaatattgtggtatttttgaatattgttgtttttttgtatattgtgattttttgaaatattgtgatttttttgaatattgtgattttgttgaatatgtttggttgaaggtatttagtttttttttgtggttttttttttttgggtttgttttttgtggttgttgtttgttttataggttaggaggtttttgggtggattagtgtgatttttttgaatattgtggtttatttgaatattgtggtttttttgaatattgtggtttttttgaatattgtgattttttagaatattgtggtttttttgaatattgtggtttttttgaatattgtgattttttagaatattgtggtttatttgaatattgtggtttttttgaatattgtggtttttttgaatattgtgattttttagaatattgtggtttttttgaatattgttgtttttttgaatgtgtttggttgaaggtatttagtttttttttggggtttttttttgttgagtttgttttttgtagttgttgttagtattgtagtttagggggagtgttaaagaaggttgaaaaggaattgtaggagggtggagggattaaaaggttatagagggtaaggtagggtggggatttttggtgtagatttgtagttttattg

SEQ ID NO: 311 - DNA, 2497 bp, Artificial Sequence
  chemically treated genomic DNA (Homo sapiens)
tagtggggttgtgggtttgtattagggatttttgttttattttgttttttgtagttttttggtttttttatttttttgtaatttttttttagttttttttgatattttttttggattgtggtgttagtagtagttgtaggaagtggatttggtggaaaggagttttggaggggaattgagtgtttttagttaggtatgtttggggagatagtgatgtttggggagattgtgatgttttgggggattgtgatgtttggggagattgtgatgtttggggaggttgtgatgtttgggtagattgtgatgttttgggggattgtgatgtttggggagattgtgatgtttggggaggttgtgatgttttgggggattgtgatgtttggggagattgtgatgtttggggaggttgtgatgtttgggtagattgtgatatttggggagattgtgttggtttatttagaagttttttggtttatggggtaagtagtagttgtaggaagtggatttggaggaaaggagttgtggaggggaattgagtgtttttagttgggtatgtttggtgagattgtgatgtttggggagattgtaatgttttgggggattgtaatgtatggggagatggtgatgtttgggggtattgtgatgtttggggggattgtgatgtttggggagattgtgttatttggggggatggtgatgtttgggggggattatgatgtttggagggattgtgatgttggggtagaatgtgatgtttgggggtattgtgttggtgttattagaagttttttggtttgtggggtaagtagtagttgtaggaattagatttggtggaaaggagttgtggaggggaattgagtgtttttagttgggtatgtttggtgagattgtgatgtttggtgagatggtaatgtttggggagattgtgatttttggggagattgtgatgtttggggagattgtgttgtttggagagagggtgatgtttggagaggttgtgatgtttggggagattatgatgtttggggagatagtattggtttttttagaaattttttggtttgaggggtaagtagtagttgtaggaagtggatttggtggaaaggagttattgaggggaattgagtgtttttagttgggtatgtttggggagattatgatgtttggggagattgtgatgtttggggagatagtgatgtttgggggtattgtgatgtttggggagattgtgatgtttggagggattgtgatgtttggggagattgtgatgtttgtttagggagattgtgttggtttttttagaagtttttttttttttgaaatttgttgtagtttataattttttaggtttggtttttgttttgtttaggttatatttttgaatttattgatttattttgtttgggattagttagatagtaggtgtagaagtgggaggtatagaaggaatgtggggttggtggttgttgttattgtagatttggagttttgtggataggaggtgttgatggttttttttgaggtttatattatggttgtttataaagttgtttagtttggtttgttgtgtgtagggatatattgggtgggattttaggtatgtatttttttggggatgttttattttgttatgttttgggtttgttatttgatagtggtttggttgatgtaatttttttttttgatttgtttttgtggtttggtggtggtgtgtgtgggttttgagtgggttaggatgttgttttttttgttttttttatggttttattaaataattttttaatatagtatttattattattttagtgtaaatattgatgtataggaagatgaagaaatttgtataggaatatttagtggtggtggtgtttttttgttattgtttgtgttagtgatatttgttttttttttgtttgtagttgtgaagtttttgtttttttttgtttagggtgtagttgtttttttattttggagtgaattttttttgtttttttattaaaagtatgaggtggtttttgagtatattttatatttttttatgatttttggaaaaaaaaaaaaagaaaagaaagaaagttttagagggttattgtgattaattatgatgtgattagttgtgtttttatggagagtagaagttgagggaagagtttatgtatgtgtggggtttattttgttatatatttttttgtgtttaataatatttaaatttgtggttgtatttgtattttggtttagtttttggatggtttttgtagttatttttaaaagggatgtttgagtgtatttttttttgagttattatgaaattatttagatttgtgggtagaagttagagggaggtggagggtttagtggtttttggttgtaagggagggtttagtttgtagtaaggattgggtagagtttttgagttttattttgtttttagttatttagtttattttttaatgaatgagaaaaataggtatagattttttattttatatagttttta

SEQ ID NO: 312 - DNA, 3095 bp, Artificial Sequence
  chemically treated genomic DNA (Homo sapiens)
ggttattatatttggtagtggggtggtttttagtttttgttgtttttttgttttttttttttgtttgtttttggagtttagttgatttttgaggttttaattttatttattttttttttgggttgttgttgttgtgtttttttttatttttatttttttgaggagagttataggttgtaaatttaattaattttgtaatttatttttgtaaaattatttataaagattttttttttgtgtttgtgtttgttttttttgtgttgggtttttttagttatggttataaagtgtttttttttttttttgagttttgtatataaggaatgtgggttggggttttgtttgtttttttttttgtttaaggtaaggattttgggaatttgaagtttggtgtttattatgtttaggtttgtagttttttttttatagagtttgtattatgggaaaaaataaaataaaatttaggaaagggaggtaatagttattgggagttaatatagagttatgtagtgtttaaaatataaatattgtagtggttagaaattttgttattttttttgtttttttaggttgttttgttgaggttttttgagtttttttgtatattgaaaggtattgtaggtgtagtgtgtattttttttttatttattttaagaagttttgttttgttattagtttttttttttgggatgagtagggagagtgtgtggaggtttttgatttttttgattataattaagaaagaataatttttaaagtgtttaatatttttgtttttaagttttttaaaatataggggtagggaatattaaaatatttggtttttattaggaagattatggttttgaaaggaaatagtagatatgatattttattttatttggatttatgattaaaaaaataaaaataaaaatttaaagagtttgtttgtattttttttttttaaattttggtttggtttgaaggtagggaatttaaaagattgaggttgatggaagagagttagtggggtgagtgagtgggtagtttttttttttgttttttggagttatttagaaggataggggaagggaaggaagaagaggtgaggaaaaagaggagggagggaagtggaggttaggagtgatggagtaaggaaagtagtttgtaagtgagaaaagagggaaaaaatatagttgtatgaatttagagagattataagttgtatgtaagtagtagtagaaagagtgagagtgtgagtgtgtgttttttttgtggtttggggttagatagtttttagattagtttgaattattttttaagtattgttttgttttttttgttttggttgttttttaatttttttttttttttttttttattttttttttaaaaattaaaataatataagggagggtggtaaaagtttttttaaattggttgatttatttaaagataataataataataataaatatataataatttatattttatggtgggagagatgtgggattaatttttggtatttattttaatatttgatagttagaataaataaatatatatatttatattaatagatatatatagaaaatttggagttaaagtatttggtaagagtggaaaaaaaaagaattaaaaggtaaaataatgattatgagtagtggtggtggtagtggtattagtggtaatagtggtggtggtggtagtagtagtagtagtggtggtagtaatagtaataattatttggtgtttggttttttttagaaattttttgtattattatttttaagaattttagttttaagaattaatagagtttaatttttggaatttgagttttggattttattattgttatgtggtaggggaggatttggtgttagttttttgagatttttattgtttttggttaattaaaagtttttaaagttataagatttttttattggttggtatattttgaggtttttataagtagagtgttttggatttggaggttttggtttgaggtttgaggggtttgaaggtggttttttttttttgggtttaagatgatggtatggtttgttttgttattattatgtgggttttttttttgtgatgttggtgtttttgttgtagtaaagtttggtttttggaattttgagaattaatttgttatttggtgatataagagggggagtgtgttttgtttttttggggtttggggttaatttttttttttttatttataaatttagtagattgagttaaatgtataaaagggagtgagaggtttgaattattgggaaaagtatgttatatatatagtagggttagagaggtgagtaagagaaaaataaaataaaataaatattatagttttttttaattagaatattaggtattatgagaaaaatatttgttaagtagtttttggtgggtttatttgttttatttttatttaggataggggtttttgttgttgttttgggtttttttttttttggtgtggtggtttgggatttttggtttttgtattttgatggtttatggatttttgtttttgattttttgttttttgtaagtttgtggtgttatgtaaattataggattggtattggttggatttttttgtatgtgttttttttttttttatttaattttttaagtgttttaaagatgtattattttaatattaatattattgaaagaagtttaaatttttggttatatgtaataattttagtttttatttttttttttttttttttttttggtgtaatttttttttttttttttggatttttgttgaagtgtgttttttttgtattttagagaaatgtttaaaggatttgttttggtttggtttgtttttttttaggatagtaagtggtgggtttaatttgttattgttgatttttgggaaattttttgttgtaagaaatgtgtgtgtgggggggagggtgggggtggtggggtggtatgtgtgtgttttttataaaattttgtgagttaaatatttgtttgtgttttgtttttttttaaggttttgagatttttgtttttgaggtttgttttaaggttgttgtaaaaaaatttttttagtttgtgtttaagagattagttgg

SEQ ID NO: 313 - DNA, 3095 bp, Artificial Sequence
  chemically treated genomic DNA (Homo sapiens)
ttggttgattttttaaatatagattgaagagatttttttataatgattttgaaatgagttttgaaaataaaaattttaagattttaagagaaaataaaatataaataggtatttggtttatagaattttgtagaaaatatatatatattattttgttatttttatttttttttttatatatatgttttttgtaataagaaattttttaagagttaataataatagattaaatttattatttgttgttttggaaagaaataaattaaattaaaataaattttttgaatatttttttgaagtgtaggagagatatattttagtaaaagtttaagggggaaaaagaaaattgtattaaaggaaaaaaaaaaaaaaaaagtgggggttgggattgttatatatggttaaaaatttaagttttttttaatagtattagtattgaaataatatatttttaaaatgtttgagggattagatagggaaagaaaaggtatgtataaaaaaatttaattgatgttgattttgtgatttatgtaatattataaatttgtaaaaggtaaaaaattagaagtaaaaatttataaattattaaaatatagaaattaaaaattttaagttattatattagaaagaaaaaaatttagaataatagtaaaaatttttgttttaaataaaaataaagtaaatgaatttattgaaaattgtttggtaaatattttttttgtggtgtttaatattttagttggaaagagttgtgatgtttattttattttattttttttttatttgtttttttaattttattatatatataatatattttttttagtggtttaaattttttgtttttttttgtgtatttagtttgatttgttgagtttatgggtaagaaagaaggaattagttttagattttgggaaagtaaagtgtatttttttttttatgttattgaatagtaaattagtttttagaattttagaggttgagttttgttatagtgaaggtgttgatgttatagaggaggagtttatgtgatggtggtggagtaggttatattattgttttgggtttggggagggagagttatttttaggttttttgagttttgaattggaatttttaaatttgagatgttttgtttatgaggattttgaaatatgttggttagtgaaaaaattttgtggttttgagggtttttggttggttaggggtagtaaaaattttggagagttgatattaagtttttttttgttatgtagtagtggtaaagtttgaagtttaaattttgagaattgagttttgttgatttttagaattggggtttttagaagtggtgatgtaagaagtttttaggaaaggttggatattaggtgattattgttgttgttgttgttgttgttgttgttattgttgttgttgttgttgttgttgttggtgttgttgttgttgttgttgtttatgattattattttattttttaattttttttttttttgtttttgttaaatgttttggttttaagttttttatgtgtatttattgatataaatgtatatatttatttattttagttgttaggtgttaaaataaatgttgaagattagttttatgttttttttattataggatatagattgttatgtatttattattattattgttgtttttgagtgaattggttggtttggggaggtttttgttatttttttttgtgttgttttggtttttggaaaggaggtggaggagaggaaggaggggaattagggggtggttggagtagagaggatgagatagtgtttggggggtgatttgggttagtttgggggttgtttggttttagattgtggagaggatgtgtgtttgtgtttttgttttttttgttgttgtttgtgtatggtttgtgatttttttggatttgtgtggttgtgttttttttttttttttttgtttgtaaattgttttttttgttttgttgtttttggtttttgttttttttttttttttttttttttgtttttttttttttttttttttttgtttttttgggtaattttgggaggtaaaaagggaggttgtttgtttgtttgttttgttggtttttttttattggttttggttttttagattttttgtttttgagttgaattgagatttggaaggaaaaaatgtaagtgaattttttgggtttttgtttttgtttttttggttataaatttagatgagatgaagtattgtgtttattatttttttttagagttgtgatttttttaatgagagttgagtgttttggtgttttttgtttttgtgttttggggagtttgggggtggggatgttgaatattttgaaaattatttttttttggttgtagttgagggagttgggaatttttgtgtgttttttttgtttattttgaggagagagattgatggtgggatagggttttttggggtgggtgggaaaggggtgtgtattgtatttgtgatgttttttagtgtgtggggggatttagggaattttgataggatagtttgggagaatgagaaaggtggtgggatttttggttgttgtggtgtttgtattttgggtgttgtgtgattttgtgttggtttttaatggttgttgttttttttttttaaattttattttatttttttttatggtgtaagttttgtaaaaagggaattgtgggtttgagtgtagtggatgttaggttttagatttttgaggtttttattttgggtgaggagaaagatgaatagagttttagtttgtgttttttatgtgtaagatttaggaggagagaagggtattttgtggttgtggttgaggggatttggtgtgggaggagtgggtgtgggtgtgaaagggagatttttgtgagtgattttgtaaaaatagattgtgaggttggttggatttgtaatttgtggttttttttgagggagtaagaatgggggaaggtgtggtggtggtggtttggggagggagtgggtagagttggagttttagaaattggttgagttttgggggtgggtggggagaaagggtgggggggtagtaggagttaggggttattttgttgttggatgtagtgatt

SEQ ID NO: 314 - DNA, 2478 bp, Artificial Sequence
  chemically treated genomic DNA (Homo sapiens)
ttatgagatttaatttggttgttttttttgttgagtgagttattaaaggttttttgtggggtggaggggtgtgagggagtagattatagattttatgttagtattaattttatatttatttgttgttgggtttttttttgagtttaaaatgagttagaatttagggttttagttttggattatgtaatttgttgtttttttttaagttatgtttgatttggtttaaaagtaattttttttttatttgtatttttaattttaaggaagtgggagagttagagtaagttaagtaaattgtggttttagtaatttgttttttgatttttaaagtttaagggaaggtatgttgagagagtttgttaattttgttttgatataagaaaaatgataaaattagttattgatatttttttgattgtatttattttagatttgggaaagaatatttggtttgttataaatataataggagttatatattttttatttttattttttttttttaaagtaagatgattttgtaaatatttttatgaaggatttgtttataaaaaaataaaaattagttttagttgttggtgtattattaagttgttgattaggtatgaaataagtgtaataggtaatagttaatttaatagtttttttttgatttttatatattgagtaaaagttatataggttaaatggaagtttagtgattagttttagatttgaaataaaatttaaattttgtttgtgagaagttttatttgagttaagtttattttttgttgggatatattgttatttgtaatgattttagtttttagtattattttttatttaaatttttttttataaaattgatttaggtaattgatttaaaggtaagttagtttttatagaaagatagatatttaaaaaaatgatttagataaataaattatatttttatagttaggaatttagagttgaattaatttaattagatgtaaaattaatgagaattttgagatttttgatgttttattttagaatttttatttaggtgtggttgggagttatagtttttgaatatttttttggaattttttttttatttgatttttaagtttgttatggggtttttttttaatggtattgatttgtaattatttaatgagtagtgggatagttttgggtaggatgtattttgggtgggtgatgtgattttgtagttttttttttgattttatattttatataatgatttttgtttatagaagttaagggggaaagatgatgtttttaaagtttgaatttttttattttggagttagaattagtgttgttgttgttttttgtagtttagttggtaatgtgtgttgagttttggggtgtagtttggagatgtgtttgtttgttttgggaaggggtatgggatgtatggttttttggttttagttgtatagtttagtttggggtttttatttatttttgtttagagttatatttggttgttttttttgattatttgatataaagagatttgttggtggaaagaattgattttaaaatttaagtttattgttgtttaataaggtgtgtatgtttttttttgtttggttttatatgttttaaatttttagtaatagaaatgaggaagtagtagttttttttggttgttggtggaggtagtgggtgtaatttgtgaagttttgtgttatgatgaatttggttatttgggtgtgttggagagggttggttgtttttttttttttttttttattattattttttttttttttgtttttttttttaatttaatttttttttttggtatttgttggttgttatttagaattttagtattttttttattatatttttgggggtaatgtattttgaaaaggttttaattattttatggatgaatttggttattttgtataaagtgtgagtgtttgttaaataattttttatagtatgtggtaaaaaagtagtgttttttaaaagatataaaaggttagtaatgttatataagtgttttttattagttttttaaggatagaaatgtgggtagtttatttagtggagatttaatttttaaatatttattgaaaaggagtgaagggtagaaaaatagaaattaaatttttagttggttgtttttttttttatatgtattagaaagtatttttaatatataatatatatttgaaaagaatataatgaatatttatgtgtttattatgtagtataaaaaaattaaaattatttatatagtggaaattatttgttaattttttttttgttgaaatatatttttttttttttttttttggaaagaaaattgttttaaatttgattttttatgagtaatttttatattagtttttaaaaatgtgaaagggaatatgttaatttaaagtttattagaaagttatgtaatgaatatttttttgttgtgtttgattttggtttttaaatagaagtttttttaaataaaattttaaa

SEQ ID NO: 315 - DNA, 2478 bp, Artificial Sequence
  chemically treated genomic DNA (Homo sapiens)
tttaaagttttatttaaagaaatttttgtttggaaattaaggttaagtatagtagagggatgtttattgtatggttttttggtaaattttaagttagtatgtttttttttatatttttagaaattgatataaaaattgtttatgggaaattaaatttggggtagttttttttttagggggaaggaaagagggatgtattttagtgaggaagaggttgatagatagtttttattatgtgagtaattttaatttttttatgttatatggtgggtatgtgggtgtttattatattttttttaaatatatgttgtatattggaaatattttttagtatatatgaaagaaaaggtagttaattgaaagtttggtttttgtttttttgttttttatttttttttaatagatgtttgggagttaggtttttattgaatgaattatttatgtttttgtttttgaagggttggtggggggtgtttatgtaatattgttggttttttatattttttaagaggtgttgtttttttgttatgtgttgtagaaaattatttgataagtatttatgttttgtgtagggtgattaggtttatttgtaaaatggttaagatttttttgaaatatattgtttttaaggatgtggtggggagggtgttgggattttgagtgatagttggtgaatgttagagggaagaattaaattggagagggaggtggagaggagggaggtgatggtgggaggaggaagggaggagtgattaattttttttaatatatttaagtgattagatttattatagtatgaaattttataagttatatttattgtttttgttagtagttggggaaggttgttgtttttttatttttgttattggaagtttgggatatgtgaagttagatggggagaaatgtgtgtgttttgttgagtagtggtgagtttgaattttgaaattgattttttttattggtgaatttttttgtgttgggtggttaggggaggtagttgaatgtggttttgaatgaggataggtgagagttttgagttgagttgtgtagttggggttggggaattgtgtgttttgtgtttttttttagaatgagtaagtgtgtttttaagttgtgttttgaggtttggtgtgtgttgttggttgagttgtaggggatggtggtgatgttggttttggttttagggtaaagagatttgggttttgaaagtgttattttttttttttgatttttgtaagtgaggattattgtatgggatatggggttggggaggagattgtgggattatgttatttatttaggatgtgttttgtttggggttgttttgttgtttgttgggtaattgtaggttagtgttattgaaaaagaattttatgataggtttgggaattaagtgagaaaaaagttttgaaggaatatttagaagttgtggtttttgattgtatttggatgggagttttggagtgggatgttggaagttttggggtttttattaattttatatttgattaaattagtttgattttaggtttttggttgtggaggtgtgatttgtttatttggattatttttttaaatgtttgtttttttgtgaaagttagtttatttttggattgattgtttaagttaattttgtgagaggaagtttgggtggaaggtggtgttgggggttgggattattgtaagtggtagtatgttttagtaaaggataaatttagtttaaatgaggttttttatagataggatttaggttttattttaagtttggagttggttattgggtttttatttggtttgtgtagtttttgtttagtgtgtaggggttagagggaggttattgggttaattgttatttgttgtatttgttttatatttgattaataatttaatagtatattagtagttggagttggtttttgtttttttgtaagtgaattttttatgagaatgtttatagaattattttattttgaggggaagaaatgaaggtgaaaaatgtgtggtttttgttgtatttatagtaagttaaatgtttttttttaggtttggggtgggtataattaggaaaatgttagtagttgattttattattttttttatattgaagtggaattggtagatttttttagtatatttttttttgaattttgggggttgggaggtaggttgttggggttgtagtttgtttagtttgttttgatttttttatttttttgaagttaaagatatagatggagaggaaattatttttaaattaaattagatatggtttagggaagaataataggttgtatgatttagggttagagttttgagttttagtttattttgagtttaagaaaggatttagtagtaggtagatgtgaaattgatgttgatatgaggtttgtgatttatttttttatgtttttttattttataaggaatttttagtaatttatttaataggaaagataattaaattggattttatga

SEQ ID NO: 316 - DNA, 2728 bp, Artificial Sequence
  chemically treated genomic DNA (Homo sapiens)
tttttatttataaaattaagttataaaagaaaaaaagaaatagtggaatgagaggtaagagtgtgtaagtaagagtaggtgtgaatggttgtatgtgatggtatttgttatagttgggatattagagagagttagattttaggttagatgtattataggggttttaggatagtttattgttttttttttaggattggttttggtatgtaattttagtagttttaggtagttgttttttggtggaatttttaggagtgggggtatttattagtgttgatttgtggggttttagttgaggatagtttggttgtgggagtttataaagtaatggataataggtaatgttttttttgtttaatagtagtggttagagggatagatttatttttatagagattgttaggtattgttgttatagatatggttttttttttggtatttagttttgtttgttttatataggagtataggaaaggaatttttaatgagtttattttttatgttaggagagaggtaaggtgttgagttttttatttggggagtttagttgtattttttttttagtttttatttttttgatttttttttttttttattatttttaattagtggtttattattttttttttagttagttttggttgtgatgttaagtggttttgttggattttatattttgtttggtttttaaaagggtattgatttgagggtataaatgtagaggttttggggtagttaggtagttgtgagtaatttagtatttagttgtttagggtgttttaggtagtggtggtagtagttagaagttggtgttattattatataagttaggtaaattttgttttagtatatagagtgtatttaattagtaggaaggaaataagttaaaatttttttgatattatatatatatatatatatatatatatatatatatatatatatatgagtttgaggataaggataaatattttgtagaaagaattttttttttattttattgatgtttaagtttttgttttaggattttttattttttagtagtttttaaaatttttgtgtttgattattttttttaatatatgggatagagagaatttggttaattttaaattttgttttttgagtatttgtttataaatagtagggggagtgatggggatgtttttttgttttttttattatttttatttttgttttttatgttatttttaggttgatagtgttggggaaagatattagattattaatttagttttttttgttagttggggaaataatatttggttattaatagtatttaattatttagagagtgagagtgagttgaggtaaatatgttgggttttagatattgttttagtttttgagatttgggtttgtaaagggttgtatatgtttgttggagggttgttgttgtttttgagaaaggatttgaatttgagtttggtgaaggtaaaatgatatagagatttatttttaggttgtgtgtggggttgatgatatagataagttgtttggtagtggagaaaatttgtttagttttgtagtgttgaaattggagatgaatgagatttaatatagttttaaagtattgggtaaagaaaagtattataatttttggggggttgttggtttgggaaggtagtggaggaagttgtgagtttttgggttttggaaggagtgtagtttttgagatattttgttttagtttggtttagtgtgtttttatatttattattaaaataagatggttagaattttgtagtagtgaggtggttaattaaaaggatagaaatgttatttttgaggtgtagagatagttaataataaatgttttttttattgaaattttttgatgaattgagtttggtggagaatgtattattgaatattattatagattagtatattgtatttattttgtgattatagttaattatatttaatgttggggagataggttgataaaattgattgtttaatgtgtttttatttattaattgatttaatttaatatgagagttttttttaatgttttggtaagaatgtaaagtgtttaagttgttaaatagtataatattttgttttaaagtaggtagatggataatgtagattatggtttgatttattagagttgtttgggagaaaataaaatattattagattttgaatttagataaggatttggtagtagtaaaaatgtgtattttttaattttgtgttttgattttttgtaatttggattatagttttttgataaattttattttttattttttattaaagaaaagaatttttgataaatttatttggagttgaggggtggagggaagtatatatatatatattattatatatatatatatatttttttttttttaaaatattgtgattattgaagtttgaaagtattaaaggataaaaatgtatagagtatgttttaaaaaataatgaaatttttgatgtatgaatgtatatatatagaaaaatttatattgagaggaaagaggtttgtaaattagtaaaataattatagatgtagagaatttttgtttgttatttatttgtatattggtgggtagtaaattgttaattaattattagattgttggagatattaaaatagagattaaggatgtatatattatattatttatttgtttttgtaaatgttagtagtatatttttgtgttggtataggtagagggtattttagtttttagat

SEQ ID NO: 317 - DNA, 2728 bp, Artificial Sequence
  chemically treated genomic DNA (Homo sapiens)
gtttgaggattggaatgttttttgtttgtgttagtatagaaatgtgttgttagtatttgtagaaataagtaaatgatgtggtatgtgtatttttaatttttattttaatgtttttagtaatttagtggttaattagtaatttgttgtttattaatatgtaaatgaatgataagtaaaggttttttgtatttgtaattattttgttgatttataagtttttttttttttagtgtaggtttttttgtgtgtgtgtatttatgtattagggattttattattttttgaagtatattttgtgtatttttattttttaatatttttagattttagtaattatagtattttgaaaaaaagaaaatatatatatatgtatagtaatatatatgtatgtgtttttttttattttttaattttaaatgaatttgttagggatttttttttttgataaagagtggagagtaagatttattaaggggttgtaatttaaattgtagaaagttagaatgtaagattgaaagatatatatttttgttgttgttaagtttttatttggatttagagtttagtaatattttatttttttttaagtagttttggtgagttgagttatgatttgtgttatttatttgtttattttggagtggggtgttgtattatttggtggtttaaatgttttatgtttttgttagggtattaagaaaggtttttatgttaaattaagttaattaataaatggagatatattaagtaattaattttgttagtttatttttttagtattaggtatggttggttgtaattataagataaatgtaatgtgttgatttatggtaatgtttaataatatattttttgttaggtttaatttattagggagttttggtagggaaggtatttgttattggttgtttttgtattttaaggataatatttttgtttttttgattggttgttttattgttgtaagattttaattgttttattttgatgatgaatatgaaggtgtgttaagttgggttggagtggagtgttttagaggttgtgttttttttagggtttaaggatttatagttttttttgttgtttttttggattaataattttttaaaagttgtgatgtttttttttatttagtgttttggggttgtattagattttatttatttttggttttagtattataaggttaaatgggttttttttgttgttgggtaatttgtttgtgttgttaattttatatataatttaaaggtgagtttttgtgttattttatttttattgggtttaggtttaagtttttttttggaggtggtagtgattttttggtgaatgtgtgtagttttttgtaaatttgggttttgggggttgggatggtgtttggaatttggtgtgtttgttttggtttatttttgttttttaggtgattgggtgttgttagtgattgagtgttgtttttttagttggtaggaaaagttggattgatggtttgatgtttttttttgatgttgttaatttgagagtggtgtggggggtagaagtgagggtggtggagggaataggggggtgtttttattattttttttattatttgtgggtaagtgtttaggagataggatttgaagttagttaaattttttttgttttatgtgttgggagaggtggttaaatatgaggattttagaagttattggggggtgaggaattttgaaatagggatttggatgttggtggggtggggggagggttttttttgtaaagtgtttgtttttgtttttagatttgtgtgtgtgtgtgtgtgtgtgtgtgtgtgtgtgtgtgtgtgtgtggtgttgggaggattttggtttattttttttttgttggttagatgtgttttgtgtattggagtaggatttgtttggtttgtgtaataatgatattagtttttagttgttgttgttgttgtttggagtattttaggtagttgggtgttgggttgtttgtggttgtttagttgttttggggtttttgtatttgtatttttaggttagtgtttttttagagattagataaaatatggggtttggtagagttgtttaatattatagttaagattgattgggaaaggaatgatgggttattggttaggggtagtagggaggaggggaagttagggaggtgggggttggggagagggtgtagttgaattttttggatgggaaatttagtattttgttttttttttaatataaaagatggatttattggaagttttttttttgtatttttgtgtaaggtaggtaggattgagtgttgggggaggggttgtgtttgtagtgatagtgtttgatagtttttgtgaggatagatttgtttttttgattattgttgttgggtaggaagagtattgtttgttgtttattattttataaatttttatggttggattgtttttagttggagttttgtaggttagtgttgatgggtgtttttatttttagaagttttgttgaaagatagttgtttggagttgttggggttatatgttaaggttagttttgggggaggggtgatggattattttgggatttttatggtgtatttgatttaggatttgattttttttgatattttagttgtgatgaatgttattgtatgtaattgtttatatttgtttttgtttgtgtgtttttgttttttattttattattttttttttttttttatagtttagttttataaatgagaa

SEQ ID NO: 318 - DNA, 2728 bp, Artificial Sequence; identical to SEQ ID NO: 316
  chemically treated genomic DNA (Homo sapiens)

SEQ ID NO: 319 - DNA, 2728 bp, Artificial Sequence; identical to SEQ ID NO: 317
  chemically treated genomic DNA (Homo sapiens)

SEQ ID NO: 320 - DNA, 2728 bp, Artificial Sequence; identical to SEQ ID NO: 316
  chemically treated genomic DNA (Homo sapiens)

SEQ ID NO: 321 - DNA, 2728 bp, Artificial Sequence; identical to SEQ ID NO: 317
  chemically treated genomic DNA (Homo sapiens)

SEQ ID NO: 322 - DNA, 2437 bp, Artificial Sequence
  chemically treated genomic DNA (Homo sapiens)
agttttggatgataaggatgtaattgtttagggtgttggttgagaggaataggaagagtgttttgtggagtagggtgggtgagaagagttgggtggttgtggggtttttgtgtatgttgggtaggaagaggaagagttgtagtatgaaggttattagggagatgtataagaagtaggtgggggttattatgttgagtagttgtagggttagtatttttgattatatttttgtggggtttggggtgagaagaggattgattgattatggtgtttagggggtgtttttgtttgtttttttgtgttgtgtgtttggggtattgtatgtgattttatgtttttaattttttgttttgtggattttttttttttagttttttaattttggattaggtaggttagagatttgagtttgtagtggttttgggtttaggttttatttgggggtgagtgttgtttggggttttgagtgagtttggtgttttggtgtggtagagtttggtataggagggagggatttgtttgtagtttttaggagttgtgagggtggggggtattgggggataggattttttttttttgtggatgtggaaataagtttaggtttgggatttttggtttagatttttttaggaggagaaagggaaggatttggggttgggggtaggagaattagtggtatttgatttgttggaaattttgttttatatttttttttttttgtttttgtgtttttatttatatatatattttgggtagtatttagggattttattaggttatttaaggttttttggaggtatgtgtgtgtgagggattatgatgtgtgtgtgtgtgtttttgtttgtgattttgtatgtgtaatttgtgtgtgtttgagtatttgtatttgtgtatgtatatatttgtgtgtatagatatgtagtttttgttatttagttttaaaaaaattaattgaaataattgatatatttatatttgtttttgggtattgggtgaggtgggggtgtaattagaatatttgtgttagtgggttttggttagtatatttttttaatgttggttgtttgggttatttttttgtgaagagtgtttttatttgaggtgaaattaaaattttttttttgtgtttgttttttgtttttttgttgagagaaatttaaataatttttatggtgttgaaattttttttatgttgataagtttgttttgggtgtatgagtggatgtttggttagttttttttgggattgattttgttgttgtgtttagtttttattatgtttttattttattttatgttttatagttggggtttttggttagttttggaagttattgagaaataggattttgtgtgtttgagagaatttttttaggggttaaggaattggttagttggaggtgtgagaaaagttttgggaaggtggttgtatttaggatgggtggatgttatggggtttttgtttaggttgttttgtttgtatgggttgattggttattttggaattttttttgtaggttttagtgttttttgggaatttgtagtttttgtggagagtgtgggtttttttttattgttggggtgtagtgtagtgtatgtttgagggtggttgttgggggttgggtatgtttttagttttgtgttgttgggggttgtggtggtgttgtttattttagagagtttttggtttggggttttggtgaagtaagtgtttttttggtgttggttgttaggggggtgtgggagtagttagatgtgttgtagtgttgggaaggtggtgaaggataggggttaggggagtgaggggtgtttggtaggtagttttagttttggttttgtgtgggagaagggatagtagagattgtttgtggggttttggggtgtagggagttgtttgtttagttttggtgtttgttttgtttgtggtagagggtggtatagttggagttttggaaagattggtagtgttggtagttgtgggttttttggttattgttttttggatgtatgggaagttgttttttgtgttgttgttgttgtattgttgttgttgtagaggggtgaggaaattaatttattgagttttggttgttgataagaggagttttggatgttggtttttgttttgtttgaggttgtaaagttgtggatttggtttggttggtttgtagtttgtgttttgttttgggaattgggtaagtagtggggatgtggggaggagggagtgggtagttgttggttttttatttgggtgttagtgagtaagggttaggaagtggtggggatggtagttgggtattttttagttttgttatttttttttttgtttttgggggtggtgttttggttgttagttttagtattgtggatttgtttttttttttttttttgattttttttgagtgggttggggtgttttgtttggttttagtgtttg

SEQ ID NO: 323 - DNA, 2437 bp, Artificial Sequence
  chemically treated genomic DNA (Homo sapiens)
tgggtgttgaaattaggtagggtgttttagtttgtttaaggggaattgagaggggaggagggggtaagtttatgatgttgagattggtggttagagtattgtttttaggagtggagggaggggtggtggggttggggggtgtttagttgttatttttgttgttttttggtttttatttgttggtgtttaagtgggaagttagtagttgtttgtttttttttttttatatttttgttatttgtttagtttttgaagtgaagtgtaggttgtgagttagttgggttgagtttataattttgtagttttgggtagggtgagagttggtgtttggggttttttttgttggtgattagagtttggtgagttgatttttttatttttttgtgatggtggtagtgtggtggtggtggtgtggggggtggttttttgtgtgtttgggaggtagtggttgagaagtttgtggttgttggtgttgttggtttttttaaggttttggttgtgttgttttttgttgtgggtgaggtgggtgttagggttgaatggatagttttttatattttggggttttatgggtggtttttgttgtttttttttttgtgtagggttagggttgaggttgtttgttgagtgttttttatttttttagtttttgttttttgttgtttttttagtgttgtggtgtatttggttgtttttgtgtttttttggtgattggtgttgggaaggtatttgttttgttggagttttaggttgagggttttttggggtgggtagtattgttgtagtttttggtggtgtaggattgggggtgtgtttagtttttggtgattatttttaggtgtgtattgtgttgtgttttagtggtagggagaggtttatgttttttgtggaggttgtgggtttttggggggtgttgggatttgtaaaggggattttaaggtgattagttgatttgtgtggatgggatagtttggatggaggttttgtggtatttatttattttaggtgtaattgtttttttagaattttttttgtgtttttggttggttgattttttagtttttggaaaagtttttttgggtgtatggaattttattttttggtggtttttgaagttggttaggaattttggttgtgaggtgtggggtgggatggggatgtggtgagggttgagtatggtggtggggttgattttaggaaaggttggttaagtatttatttgtgtgtttagggtgggtttgttggtatggaaaggattttggtgttatgagggttgtttgggttttttttagtaggagggtgggaggtgggtgtgaaggggggattttaattttgttttaaatgaaaatgttttttgtaaagaaatagtttgggtagttagtgttggagagatgtgttggttaggatttgttgatataggtattttggttgtgtttttattttatttggtgtttgagagtgagtgtgagtgtattgattgttttaattgatttttttaaagttagatagtagaggttgtgtgtttgtatatgtagatatatatatatataaatatagatatttaagtgtatatagattatatgtatagagttatagataaggatatatatatatatattgtggttttttatgtatatatatttttaaagagttttgggtaatttggtgaggtttttgagtgttgtttaagatgtgtgtgtgggtggggatgtagggatggagaaaggggagtgtgaagtaggatttttagtaggttaagtgttgttgatttttttgtttttgattttaaatttttttttttttttttttagggaggtttgaattagaaattttaaatttgggtttgtttttatatttatagaggggaggagttttattttttggtgttttttatttttataatttttaaagattgtaaatgagttttttttttttgtgttagattttgttgtgttaaggtgttgagtttgtttaaaattttaggtaatatttatttttaggtggggtttagatttgaggttgttgtgggtttgggtttttggtttgtttgatttggggttagggaattggggaggggaaatttgtgggatagggggttgggggtgtggagttgtgtgtagtgttttagatgtgtggtatggaggagtgggtgagggtgttttttggatgttgtagttagttagttttttttttattttgggttttgtaggaatgtaattgaggatgttggttttgtggttgtttaatgtggtggtttttgtttattttttgtgtatttttttggtgatttttgtgttgtagttttttttttttttgtttagtatgtgtgaggattttgtggttgtttggttttttttgtttgttttgttttatggggtgttttttttattttttttggttaatgttttgggtaattatgtttttgttatttagaatt

SEQ ID NO: 324 - DNA, 2382 bp, Artificial Sequence
  chemically treated genomic DNA (Homo sapiens)
ttaatttatggttatttgtttgttatagtgaatttttttttaggaaagaatttgttttttgtaaagaggatgtgtaatgttggaaagtttgtttttttttttattagttggattttgagagttgggagagatgattaatgaataggttgagggtgttatagttttgttattttgggatggggggtgtagtaggggagttatagtttttttagaggttaggttattttatttagttgtattttatttttaattttttagtgggtgatatttgtagggtgttgggattgggagaaattttagatattttaaattttaaattttattttttagatgaagatattgaggtttagagtgggttagtgagttgtttaaggttataggataggttagaatggaagttttttgattttttttggggtgttgggtttatagttttattttgttattttttgttttggaagtgagtattgaagttatttaagagaggttagtgattaaaggtagtgatttttaggtgtagaggttggggtagatgtgtttatgagtttgtttttttgtgtatttttttttattttgtttttatttttgttttggttattatgtgtttttattattttgagatttagagaggtgtagtggtttgttgaaggttatatagtatattgagtagggtttttgtttttattgtttagttgtttttttttattgtttatttgggtttttgtaagtttgttaggatttttgggagtttgttttttttaatgtatagagttgtggtgtgtgttaaagtgtgggaaagtttttgggagagggaaggggtagaaaatatagttgtttattttaattttggatggttgtggtaaggtaggggtgtttagaaaggtagttagttttgtgtattgttagtgtttttggtatattttattttgtgttaggggttttttagggttgtgtgagtatgtttttttagtttttttttagtgaagtaggtgtggtggggttttatgtgtttagtatttatttttttttgtatgtttattttatgtatttttttgtgttttttttatggtttttttgtggtgagttgtttttgtttttttgtaggtttttggttttagtgttaaggtattgtggttttttttgttttttttttgtgttgaatttgggttttttgtggggagaaataggttgggggtgaggggtttttgagataatttaggatatttttttggggtttagttaggtaattttgatgtttatggatttttggattatagtttttattgtgggtttagttttatttttagtttattttgtggtgagtgttaagttttaaaagttggagtgttattgtttggtgattttgtgtttgtttgtgttttaggttttggaggtggttattgttggtttaggtatggttttgtttgggattattggttgtttttgtggggtgttttgtttggggtttttttttattttgggatgttttaggtgtgtttagtttgagttggtggagagggtgggggtgggggtggttggggttttgaagtttaggtttttttttttatttttttgttggttttgttgttgtggtttttgtttttgtgtttgtttgtttttgagttttttttttttttttttttttttttttttttttttttgtagtagtaataatttgattttgttttttttatttgttttttgagatgttttttatatttgtttgtatatagtgtgtgtggtttttttgaaggtgatttttgtaaattgtgatgtaggttttttgttttaggtaatttttgttgtgggagaggttgttttttggtgtttatgttttttttttgtagtttgtattgttggttgagggggaaatgggtgataggggaaggggaggtgtgtgtgggatggattaggttggggtagaggggtttaaattggtgtggttttatagaagtttgaggagggtggggttggttttgagtttttggagttttatgggatttttttgattttattgaggagtttttgttagttttgtgtatttttgtaatattttttattttatttgttagttttgagtttatagttttttgggtttggggattggttgggggaggggatgggggggaggggattttttggttgtagggaatggtgtgtgggtgggggtgggagggaaatgatttgttttaggagatagggatgaaggtttttttgagttaagggagggagaagagaggtggaataaaaggtagatgttggaggggaaggggagttggggagtttgttttgagggttttggtagtttgtggttttttgttttagtttgttttagagggtgaggttaaggttggtgttagggttttttattggttatttgga

SEQ ID NO: 325 - DNA, 2382 bp, Artificial Sequence
  chemically treated genomic DNA (Homo sapiens)
tttaggtggttggtgaagagttttggtattagttttgattttattttttgggatagattgaggtaggggattgtgggttgttggagtttttggggtgagttttttagtttttttttttttttagtatttgttttttgttttatttttttttttttttttttgatttaggaaaatttttatttttattttttgaagtaaattgttttttttttatttttgtttgtatgttgttttttatagttagggggtttttttttttttgtttttttttttagttaatttttggatttgagaggttgtaaatttggagttggtgggtggggtggggagtgttgtaggagtgtatggagttggtggggattttttagtagaattgggggagttttgtagggttttgggggtttggagttggttttgttttttttaaatttttgtaggattgtgttagtttaaatttttttgttttagtttagtttgttttgtatatattttttttttttttgttgtttattttttttttggttggtagtatggattgtagaaggggggtgtgggtgttaggaggtggttttttttgtagtggggattgtttggggtggaggatttgtgttgtggtttgtggggattgtttttggaggggttgtatgtgttgtgtgtaggtggatgtgaggagtattttaagaggtgggtgggggaagtgggattaggttgttattattgtagagagagagagaggaagagaagagagagagggagagatttgagagtgagtgagtgtgggagtgagggttgtagtggtagggttggtggggaagtgggaagagggatttggattttgggattttagttgtttttgtttttgttttttttattagtttaggttgaatgtgtttggaatgttttagggtaagagggaattttaggtggggtattttatgagggtagttagtagttttgagtgaagttgtgtttggattgatagtggttatttttagggtttgaggtgtgggtggatgtggggttattaaatggtgatattttgatttttggggtttggtgtttattgtgggataaattaagagtaggattgagtttgtggtgggaattgtaatttggaaatttatgggtgttggaattatttggttagattttggggaggtgttttgaattattttgggaattttttgtttttaatttatttttttttgtggagagtttgggtttaatgtggagagaaggtgagagaagttgtggtgttttagtgttgggattggggatttgtggggaagtaaaggtgatttgttgtagagaagttgtgggaagggtgtggggaggtgtatgaagtgggtgtgtggagagaagtgggtgttgggtgtgtgggattttgttgtgtttgttttgttgaggaggagttggaagaatatgtttgtgtgattttggggagtttttggtgtagagtggggtgtgttggaggtattggtggtgtgtaggattggttgtttttttgagtgtttttgttttgttgtagttgtttaaggttgagatgagtggttgtattttttatttttttttttttttaggaatttttttatattttgatatgtgttatggttttgtgtattggaggaagtaggtttttggggattttggtaagtttgtagaggtttgggtgggtaatgggagggggtagttgggtagtggaaatgagggttttatttagtgtgttgtgtgatttttgataagttgttgtatttttttgaattttaggatgatggaggtatatggtaattaagataggaatggggatgaggtgggggagggtgtgtgggggaataagtttatgggtatgtttgttttagtttttgtatttgggaattgttgtttttggttattggttttttttaagtgattttagtgtttatttttggggtagggggtggtaaggtggagttgtgaatttagtgttttggggagagttggaaagtttttattttgatttgttttatgattttgggtaatttattgatttattttgggttttagtatttttatttggaaaatggggtttggaatttaaggtatttgaggttttttttagttttaatattttgtaggtgttgtttattgaaaggttggggatggggtgtagttgggtagaatgatttggtttttgggaagattgtagtttttttattgtattttttattttaaagtagtagggttgtgatatttttagtttgtttattggttattttttttaatttttagaatttagttgatggggagaaaggtgggttttttagtattatatattttttttgtagagggtagatttttttttagggaaaggtttgttgtgatagatagatgattataggttaa

SEQ ID NO: 326 - DNA, 17220 bp, Artificial Sequence
  chemically treated genomic DNA (Homo sapiens)
tttattgtatattatttattttttaggttgttagtgtggtttttagttttttttaagttaaagatatattatttttttgtgaataagtgtgtgaatgtggttgtgtggtttatttttttgtatttaagttggttttatttatttggtaggaaagtttttgttaggtattgaggagtgtttgttatttagtttgtgtatttaagtatggatgtatgtatatgaatgttttttgtgtttttaagtgattttttttatatttttaaatgggttattgtttttggaatgtatttatagaaattttgttttagtttttagtttaataaagtttgggattttttttttagaatattgttatatatttttgtatttgtatatttatgtttatattttttttggttagttttttattttttatgtattttttgttttatttgggtaatggagtttaagtgttttgatttgttttagtatatgttatttaagtgtatattttaatttgagtatttgtattatttttattttttttgttttgtttataatgtggtttttttttaggttagattaatatgggtttgtagtttaaatgtaaatagaggattttttaagattataaatttttaaagaaaggaagaggagggaggaggagattggaatgttagtaatgagttatttatgtatagggtaatttatttgtttattttaagttgaagaaagaattagataaatgtttgtagaggtgtattaaaattttagattaatttaatattagttatatatatatatatataaatgatggattttataatatattagtgtttagtttttttttggaggttgtttttttgtatatatttaattttttataagtttttggttaaaagtatgtttatttatatagagataatttaaagattgttttgttttttttagtgtatatttgtatatgttggtggggtattttaggtttaggtttttggtttgtagtagttatagttagaggttttatttgattatagttatgtgtagatttttttgtttttgaatatttgtatgaattttttttgggaatattgagtttatgtttgttttttaaatttagtttttaaagtgagggtgtttattgtgtgtgtttatagttttttgattgagaaatatttggttaaattagattatttagtagttgtgtttggtttgtggaagaattgagtttgatgtattaagatgtgattgtgtatatataagagaaaggaaaattttaggtttagatttatagtttttttttattgtgagttattttgtttttaggaatttttattaggttttttgtttttttttttttattatattattttattatggtttttaaagggttaagagaaatttttatggttttttttttatttagtttgttgggtttggaggttagtttgtttatttgtagtttatagagtttgttgttatttttgtgttttttttttttttagttttttagttgggagggagtttgtatgtttgtttagattgatttattattggtatattaataatatttgtgagagtgtggagattttgtttaggttttttggtttgtatggtttatggtggatagaatttggggagtgtgatggtgtttgtggggtgggggtagggggtttataggtattggttgttttgagtgtattatgggttttttttagttttggttttttgtgtttttattagtttggttgttggggtatagttatagttttgtgtgttgggtagttttatttttattttgtttaattttaaattgggtggggagtataggtgttgtgtttagagaataagagataggtgtgggaggtggggaggagtagttaggtagtgatgtgagtgggagtgagttaaagatatagtggaggtgattgtgggtaggaagaaagagtgggttgtgtgggttttgaggtgttgtatgtaatgtgttgttttgtgaagttatatttgtttttttgttgttttttgttattggtttttttttattttttagtggtgttttttgtagtttggatagtgaggttttggtttgtgtgggaggtggaggttaggatggttttgtaaagggttggagagaattgttaatgagttgtgtagtttattgatttggagaatattttttaattaatttttagttatttattggtgatagtgttttaaaggatagtgttggggttagttgagttttagttgtgatttgttggttgggtgtttgttgtttaaaatttgtgtgtttttttaaatattttaaggtaattggtgtgtgtggtggtgtatatttgtatattgaaggttagttttggattaaatttggatggtatattaattattgttttttttttttattttgttttatgtgttgaaattttgtttaaaataaatatgaaaattaatattgtaaaatttatattagataataggttgagagaggagtgggtagggttaaggaatgagtgtattttttaagtgtttatgtataggaatttttgaggttgataattaaaatgttttttatgtaagtaattttgttggtaaaattgaatttaatattttgtaaggattgattttggtttgtggtgtttgtttttagtgttataggaagtgttagatggttagaaatatttaagtttgtttgtatttattatttattattttttggggtgggttatttttttttagtttttatttttaggttattttaaggatttttttttaaaagattatttttagaattaaatattatattattttttttttagtgtttttttaaaatgaaaaaagggggggaaaatatagttaaaattttgagttgtttagtttagatgtagtgaggttgtgtgaatatttatttgaagtgtgttggtttttttttaaggtttgtttttaaatatatataatttttttttttttttttttgtttttttattttttttatttttattttttagatgttggtggtgtgtgttttggtgtgtgggtatttatagtttttagttggagattgtggattttttggaaaagatttattaatagtaaattatgttttgtttggttatggtttatatgttgttagatttgtttgtttttgggattttgggaagggtttatttgagtgtgtgagtggtgggaagtttgttgggattatgtgtgattttggttgttttattttatatatggtgttttaaggttttttttgtaaatagtaggtgtttgttattgttgttgtgagtttttgagttggtggaggttttgtggtgtagttgtttgttggttttgagtgtgggttttgtggtgttttgttttttttgttttggttgaggattttgttttggtgtgtaagtttttttttgtttatagtttttttgttatatgttttttgagtgggattaattttttttggttgtagatttttatatgtttattagggttatttattagattttttattgtttagtggagggtttaggttttgtttgtttttgttttttttttatgatgttgtttttgtataagtatattttatatttatttttgggggtttataatttaaaatttatgttgaatattggggagggagaggagggggaaagtgggagggggattgtagattataattttaaaagaatatttataaaataaagtgtttgatttggttggtgggtgggttaagttggaattttttgttttgtttgattttttagtagtttttttttttaatttatgtgatttgtgttttggggtaagttaagaaaaaatgggattttttttttgagttgtgtggtagtggtggtaggttgagtttggtttggtttgaggtatttgttatatatttttgtgtatgtatatgttgatgttttatttggaggaatgattggtttttggagaggtgagatgaggtggtggtggtggtggttgggggtttttatagtttttttttgagttgaaaaagaaagtagatggtaatttgttgtttttttttttttgtttgtgagttaatgttgaatttagttttttagtttttagtttattttttttttttttgtttgatttgtggtgtttagtggtgattgtgtttttgtgtatagatatatataggttgtaaatttttattttgtgaattttttgttttttttttggtttattgggaggtgttaggtttttagttgtgttttttttttttttggtgtttatgtggggttgtttaggttggttgtattttaaataatatagttatgaaataaaaatgaaagtgagttaagtagttaaagggaagtgtgaggtaaaagttttgtggggtatgttgtgggagggggttttgggagagggggttgattgtagtttttagtgtgtttgtttgtttatttgtttgtggttttttgggggaaaggtgttttgggtattgatttgaaatttttggtgggggagtaggtagggagtttgtgatttggttttttgaagtttttttttaagtggatttgaggtggtgagaaggagtggggggtggttgggtgggtggagagagatatgaggggtggggggggttggtgatgttaatgagtggagaaggagttgggttggagaagtgtggtgagtagtaaagtttgtggtttttggttgtttgtagtttgtttgtggtgttgtgtttatttgatttttttgttgtttgttggtagttggttgtttttggggttggttttgttgaggggtgggttttgggttgggtgggggtggggtggggtgggtttggggtttttgggtaggtggtgatagttttgtgtgattttttgggtttttgtagttggattgggtttggttgagtttagtagtttttgtgttgttgttgttgtttgtgtttgggtaggagttttagtgttatgttgatggtttgttgtgagtgtttgtttgggttgggtgtgtgtgagtgtgtgtgagtgttggttaagttgtttttgtgtggtgatagtgtggtttgggttttttgtttggtggtttgtgggttttttttttgttgttgttgtttgtttagtttttgtttttggttgtggtttgggtttttgtgtgttttttttgtagttgttgagtttggtttgtgtttagtgaggagtgtagttttgttttattttgttgttgggagtttaggttttgtttgttgttgtatgttgtgattttaatgtgttttttttttttggttttttttttttttttttttttttttttttgtttgtttttttttttgtttgttttattttttttttttttaatagttgttttttttttttttgtaggtgtagtgtttgggtgatagttgtttgtttgttgttgtttttagtttttgtaagtttgagttttgttagtttttgtttattttttgttgtggtgtttttgtggtggggttttgggaggggtgattttttaggaaaggtttgtttgagtttttttggttgttattgatgtatggtttggtatgttttggtttttttggatttgaattttggattatttgggtggtgttttttttttttgttttttggttttttttttttagtttgggttgagttggttgtgtatgtttgatttgggtgtatgttttgggtgagttggagattgatttgggtggtggtggtggtgagggttgttggtagagttagagttgaagggatgggggtggtgggggtggtttttttagttgtgtgttgagattttttttgttatttagaaggttagtggaggattgtaattattataaagtgttttgtattttgtttagttaaagttgttaaattttagtggtagtagttgttgttgttgttttttgttattagtgttgtgtttttttggttttgttttttttgagatttagtggagtgtggtttgtgtgtttttgtgtttatttttattttagtttgttttttttttttagaggagtttttttttattttggtgttaaaagttatttgaaaatattattttaggtaatggtggttgttttgtttgaattttgtgtttgagttttttggatgttttaattgtgtgggaattgtttggaggtgggggaaggggggagtagtttgtggaggtattgggaggtgtgtggggggtggttggtgagtggagatttgtttgtattttttttggtttttgagtatttttatggtttgtatttttgatggttggaggggttgtttaggttttttgttttggtgttgggagattattttttgtgttttattttttttgatagggagtaatttttggtttatattgtttgttttataaatttttatttggtaatgttgtgttgattggtgtttggtggtggtgtatagtttgtgtttgtagtagtttaatttaattgatatgtattgagtttttttagtgtatttggtgtggttttgggtgtggggggagggtgggggtaggtgggagggagggggaagtggagaagtgaggttttggtttttttggagtgtaaagttttaagggtgagttgagaagttttagttggtgaagttggtgggaaggggtaggagtgggggagggggtattttggattaattgtgtttagattgtgggtttggattttgtggttaatggtgattttatttggttgtttattagggtttttttatattgggaagggggtggggtgtttttttttgtttaaggataagatggtgtaggttttatgaaatataaatttgaaatggaggtggtttgtaaatttatatggaaagtttttaaaatattttggagtgtttttatgttaaaaataattaaaagtattttaagttgattattaagttaaggttaaggttaaaattagttttagttagtagatatttttttttttaaaaattagatttattattgattgtgggattggtattaggtgtgattttatttattttgttttagtttttagtatatagttataaaaatagttttttttaaagtagaagtgaaatatttttattgtttgaaatttgaaattttggtagaattaaatttttatgttttagagttgtttataataattgatgtaaaagataggtgagtaagtgtttttgtgagtagtgtttagttaggttgggttgtgaatgtttttaggattagtgtttgtagaatggaatgtatgtttttttttttttggtttttttgggggtggatatttttgtaagttaatttatatatttttttaatttttggtaataagtagaaagatatttggattattatgttgtaaaattattttttataaagatattttaggattagatattaaaagttattagattgaatgtatgtgagttatagatatagttggagaaaaggtttttggttgtgtgttgtggtaatatttttttttgaagtgattttttttatttaaaataagttaaaaataattgggaaggttgaagttgggtatttgtggggaaattttgaatgtggttttaggtgaggaggttgttttgttgttgtaggttggatgggagaattggtttgggttagtgtggagttgtgttaggtttttttggtttggttaggttgaattgtagaggttttggtttggtgtttagttattttttattttttttttttgtttttttaattttgtttttaggtataggttttttttggagtttgaagttgtatgtaaatgtttagaatttttagaaaatttaggaattgagtttggggtttgtagttttttagagttttatggttttttggggttgttgataaagaggtttgtttgtttaattttaaaagttttagaatttgggaggttgagttaggagaattgtttgaatttgggaggtggaggttgtggtgagttgagattgtgttgttgtattttagtttgggtaataagagtgaaattttgttttaaaaaaaaaaaaagaaaagaaaaagaaaaaaaaaagttttagagttaaaatgaataggggtggtgggggtgttgtaaatgtgaaggggttgaggggagggttgattgggggagaaatttgatgttggagataaataggttagtaaatttgtttttgatgtaatttgtaatatttttttttattttttttagggattttgtttttatggtaggttggtaggattaaagggttttttttttattttttagggatatattttttaattttgtgggattttaaaaatattttattaagggagttttaagaggtatgagtggtgggggggatttgtgatttattgggaattaaaatgtgggatttttttgaggtgttataaggtagagggggggaggggagattatatttattggtttggttagttttaattgttttggggaaaataagtagaaagttgttgaagggtaattttattttgtgtttttatttaagaaggggtttagggagttggggatgttgtggggtttgtaatgggtgttggtggtttggttttttttttgttttttttttttttgtttttttataagttttttgggagttgatttgggggttaggttgttatatttagtatttagtaaggggaggattttaatgaaaatagaggaggaggagagagtgagtaaaggagtgtatgggaggggaggttgtgtagtttatggagaaataaagaaataggtgttgaaatgagaggtgttgtggatggagtagtgggggttgtttttttgttattaatttttttttttatggaagtgttttttgattataataaattatttgattttaggttaattaggttttgtaattgggtaattgagttggtttttttaggagtaggttttgagtttggttgttttttttaaggtaggttgattttgtaagatttgttagggttttttttatatatttttagttttattttggtttaggggaaaggttaggtattttgtgtttggggggattttggttttttaattttgtgtgtaagatttatttataatgtatattaggatttatattataaagtttataatgtatgtgtaggtttttgatggttttttttggaggttgtttttagggtgatgatatttggtattggaataggtgggatttggatgagtatagataatgtatttttatataatgtgaggtagtttttttttaaaaatatatttatatttatagttttttggttattttgtataagaattttgggtttatttaatggtattttaaaaaatatttgttgttttattttttaagtataaggtatagttggttttttttttgaaatttaaatgaggtaataaataggaggtgtattttttttttaggattttatttatttggaaatatttaaaggtagttgttttttagggtagaagattgttggatttaagggttgttaggttgaatatgattgtttttttttttttttagtttttggagggttattgggtgtttggggaaggaaggttttaagggtagtttttttgtggtttttagtaattattttggaatttttggtttgggtttgatttgggttaggttttgagttttttgaatataggtatgtgtgggtgaattggtatttatattatgggggtttgtagggtggttgggtgttgattaaatgggtataatataggaggtttttgggaggttggttgttttttgtgtttggtaagggtttaagagtttttgatgttgttgtgttgggttgggtgtttttgtagataaatttggatgttatgttttgttttggttgtttatttagtaaggtgttttttgtgtatattttatttggttgggggtagtgagtgggaattgttgggagagggggtggggaattattaattatttgtttttggatttagtgtgttggtttttggttttagttattttgtatttagttttttttttttatttttattgggtttttgtgaagatgtattattttgaatttttttgtggtattatttttgaattggaggggtagagaaggttttgttagttttttgtttgtagtaggaaggtgggtatggattagtagaagggaaagtggtgttgatttgtttttaaatatttttgtttttttgtttttaataaagttggttatagaggtgagtggtgtgggatggttgttttgagaaggttgtagttaggagtaaagttttggggtttataatggattgggtattttaaatggtgtaatttttggtatattttatttgtttttattttattttttgaattattttgtttttggtgtttatttttttttttatatttgtgtttttagtgtgttagtagttgtgtagtttttggttttgagtgtggggggtggggtgggggggtttagggtggtttgtgtggtgtggtttgatagaattttttgtgtgtggtggagggaggaggttaatgtataatgtatagtgtttggaagtttggttattagtggtttgttggtgatatagataaatgattgagagggaggagatttagtttgttttggagtttaaatagattagtgtggaggggaaatgttatgatttaaaagtgtgtgtttgtagatatttgtatatattttaatgatttttagtaggttatgtgttttagttttgtatttttttttttttaaaaggaggatgtgtttagaggagggaggatgaaggtagagtgagaggttttaatttagatttattagtagtttttgagagatgaaggaggggagaagtttagaaagtgaggtttggggaagttatatgatttaaggttaagtttagattttgtttttaaaataataatttaaaaaaagagttatttagttttttattttggattatattttgtgttgtattagaaaggtttgggggaaagaataaattttgttatttttgttttttttgggagtttatatttttgaattttttttttttattgatattttagagatttttttttttttggtttaatatattagtgttttttagtaattaaggtgagaagggggtggggataaagataagttaatttttttttttgttatgtaagtgtgagagataagataatgttaagttggggtaaagtggttgtttataatttttttttagtgattttgattggttattttttattttgtaaaaatgttttttttgaaaattggattaaaaaagaaaaagagaaaaagaaaagaaagaaagatttttatttggaagtgatatttaaaatttattttttttttattgataatttattttttattggtggggttttttaggaaaagttgtattttgattgtaggattttaggtttttttgtggggggtaggattattagtgtaattaggttgaataaaattagggatgtgtgatgaggatttattttgtatttaatttaagtttgtggttgggtttttttttttttagttattggttgatgtttgtgttttgttattgtatttagtgtttttaaattaaataggtagttatatttgggagggttatataattatgttaatatgaagtggttgttaatgtgaaataagaagaaatttttttgatatttataggtttttataaagggagagaaaggaaattatattttttagaatttgaaagtttttagttgaattggatttttggggagttttagaaatttttttttttgtataggaattttgtgaaggggtttttggaagattttgttgaggaaggttttggtattagattttatgattttagagtgttttgtaaattttttttggtttagtggttagttttagaatgtaaattttaaggtgggtgttttagattaagttgatttagtttttgtttatttttagtttataattttgaggtttttattttttgtttttgattgggttggtattgtggtgtttggtatatgttaagtttattgtttttaagttaggttgtaagatttaaaggttggggtttgttgtggatggattgtttttggggagttgaaattgtttagtggggaaatttttttttttgtttttttttgaaaagtttggttgtggtttaagttttgagtaagtgggtatttgttgatagttgggttttatgtaaggtttatatgtgttttattagttagtttgagttttttttgggtgagttgtttggtgtggttttaaggttgggtttaggtggggagagggtgtggggttgtagtgagttgtgggtggaggtgtgggttttgtggagtttggttaggtttggttttgtgtttttgggtttgtgggtaagttgagttggtggggtaggttgttttttggttggtgttggggtgttaagttgtgttttatgtgtttgttatattagtagtagtggtggtggtggtgaggagggggtgttgggaggtgtgtggttgtttttgtggggtttttggattttgtttttttgtttttttttgtgggggttgggttgagattattttgtggtttttattttagtgtaagttgaaagtggtgttgttagatgtagagaggtttttggggtgttgttttgagagttgtgtggtggtagtagttaggggagggtgttttttgtggttgttttgttgttgttgttgtagttatggggattggaagtttttgtgttgttttgagtggtttttgttggttttagggttgttttagatgagggttggttgtgtgttatttttgatttttttttgttttaggtgattatttgggttttgtggtattttggtgtaagttgagaggattttttttgtggtttgatgagatgtttttgtttttttgttattattataagtatgtttttttgtattgtttgtagttttgtagttgggattggaggggtgtggagttgttattttggttgggtaggaatatttgtttttaggttttgtagttgggtgtgtgttgttgtgagaggttgtttattgttgtgtgtagagattgtggaggagaaaatagggttttgaagtttagggttaggagtagttaagttttggttatttttattttttatttattgtaggtgatagagtgtgaagttagagggtttgttgggggtttgggtttttttttgaaggttgaagggttgttatttttgggatttggtttttggtttgaagaggttgtttataaaatagatggggtaaaatttgttttgggagtttttttagtgtttgtttttgttttttaaattagatatatttattttttttttagttttattttagtttttggtgggggatgggagtaggttatggtggtattggtattttatttgtttttttttatgtagggatgtagggttggttgtggggtttggattttgttattttatttagggaagggttaatggatgttttttgttttttttgtgtttggaggagatttggtggtggagttgatttgtaaggtttgttttgttttatttattttttatttttgttttattttttttgatttttttggtttagggtttggtttgggaaggtgttgttttgttagtgggagttgagtgagtgtatagagaaaagtttttttattttaatgagagtgtatatagtgttgtagtgaggaggatgattatttggtgggtggggggtgtgggtttgggttgtgggtggtgtgtgtggtggttttgtgggtttggagtttttgtttgtttggttgttaattgtatgttttttgttgttatggaggtaggtgggagttggtggttgagtttagtgttgatgatttggtgggtgatatggaaatatggtgtagtgttttttttttgtttgtgtttttgttttttgttttttttgtgtttttgttttttgttttgtatttttttttgtttgtgtggtttttgtagttttaatgttttgtttttggtttggtattattatgttagtagttgtttttttgtggttttgtgtgttttttttttttttgtttttggggtttatagaaaatgtttgtttttgttttgagtttttgttaaattaaatttgtggtggtaatggaaggtggtgtaggtggggaggggtttggggattttggtagtagttggttagagtgtggtggaaattttttttgttgggttttttgtttttttttattttttttttttaatatagagttgttggttttttgatgtttttttttttgtttttgagaggttttagtgttttaggaaggtttgggttatagagattgtgattaggggtgaagaatttagagtgtgtgtttgtgagttttgaggttttggtatttgatgattttgttttttgtagttttgatttatttttttttttttggttatttggggttttgtattagttggtgaagaaggggagggaagagaaagtgttttttttgtgtgtgtggtttttattttaaggatttgttggaatttgttatttttaattgtatagtttttttttgtataggatttagggtgaaagtggggaaatgttggatttagggggaaagggttgggttagaaatttagttttggaggttggattgtatttttttggtgggtttagttatatttggttggtatgtggggtggggtgatttagtagagtgggggatgtaagggttaggttttttggtttaggagatgttaaatgttttaattttggagtgagagagtaggaatttttgtttttatttaagtgtgtgtgttttttagtttgatgtgtaagttgtggttttttgtgttagagttgtttaggtggtaattttttaagtttgtaattaagtgaggtgttgttgtgttttttgttagtgttggttttgttagttgtatatggttttggtgttttggtttgaggttttgtgattagttataggtttgttttgttttttttttaatttgtttttgtaggtagtttggggatgtggttgatttggtggtgttggtagggagttattgtttgtggggtgggttttttgattagtgttagttttgttgtgtttgagttggtgtgggttttggggtgtgggtttggtgtttttttttttttatagttttttggttggggtggtggtgttttttttttttttgttttttttttgggtttgtgagatttatttgtgtggtgttatttgtataaaaataggataagtgtttttgtgtgtttatatgtgggaggtgaaatttttattgatgtgtttgtgtggagtttttgattgttggagtggtttgatttagggtgtttgtgttgttttttataagaaaggagagaaagttttttttaatttttttggtggtttgggtttttagaagtatgtttttttgtgtggttggaatggtttattatttgggttttaagtgtgttggatttatagtgagtaggttgagggttaggtgggaggtttattatgatttataaaattgggtggtttaattgttagttgttaatttatttatatgtggagttttttaatgttttttttgtttgggtttggttttttgagggtttgttttgatatagttagagttgttaagtgggagttaatttagtggttttttttttttgttggtagtgtggttttttttttttggtgatttttgtttttttggtttattgtgttgtttgttagtaattttttagtttggataaatagttgggagggtgttggttgtgtggagttagtaaattaattattaatttttaagtgaggtttggattaggggagggagtggtggttagagttgagtttgtgaggtgagtgtaaagtttttattggggttaggagttatttatgtgttaatgaattgggtgtgtgaaggtgggttttgttatggttttttgggtttttttagaagtttttgtttgttgggttttttaagtttgtattttgtttggttaggtaggttgtgttatagtgttgtttttgggagagtttgaatattaatgagttgttttgggttttagtggtttgttttttataggagagtgttttgtgtttgggtaagttttttggatttggttgggttttttttggtttaggtttgttaaattaaattgattgtattttgtattgattaatttttttgtggtattttttttttttagtttatggtggagttggtatgtagggggttaaaagttttggtttgttttggttttttggttgtgaggagaaaatgttgattaaagtgtttaaggggaaggtaatatatgtatatttggttttgggttgaaggaggttgattggagatggtttttgagttatttgttttgatttgttttttatatttttgggaatgtggtggtggtggtggttttggtttgtatgatttgtttggtggagtgttgtgttgttgggttgggagggtggtggggaggaggagagatgagggggtgggaggtgaatttgggttgtgtgttaagaggtttggagttgtagattagttattgtttggttttgtgtttttgggtgtgtttgggaattgggagggtaggtgttggttttgtttagttgggttttttggtttttggtgtgggtgtttttatttttatttttgtgtgtttttggtgtggttggtttgatttttggggatttgtgtagttgagatttatttgttaggttaagggtaggatagaaattttgtaagtggagttttgtttgtgaataggaaatttttttttgatgaggtgttgttttttttttatgttgggttttaaaataaaattttagagtgggtggttaggtatttagttttgtttgttatggttggtgatttttgttttttggttttggttttgggtggtggagttaagttaatagagttggtggatggatttggtgttggttttgtggagggtgttaggttgttattttttggggtttggatggggttggtgggggtgtggagttttggagtttttgtgtttttttaggttttatagttattgagtggttttgtggagttgtttgaggttgttgggttagtggttttttggagggtgtggggggtggggaggttgtgtggtgttgttgatttggtgaattttgttgtgggagtttgggagggttgtgagtttggtttggtaaagtttttgtggaaattttatgttttgaaatttttgtggtgttgtagaaggagggggagaggggagtgtgggaagtgtgtgggggtggtttgtatttgtttttttttgttggggagtgggttttgtggttttttgggttttatgggaaagttggagggtggggatggttgggtttttgggtttg

SEQ ID NO: 327 - DNA, 17220 bp, Artificial Sequence
  chemically treated genomic DNA (Homo sapiens)
tgggtttggggatttggttgtttttgttttttagtttttttatgaggtttggggggttgtggaatttattttttggtggggagaggtgggtgtagattgtttttgtgtgttttttgtgtttttttttttttttttttttgtgatgttgtaggagttttaaaatatggagtttttataggaattttgttaggttgagtttgtagtttttttgggtttttgtagtgggatttgttgagttggtggtgttgtgtggtttttttgttttttatgttttttggggagttgttgatttggtggttttgggtagttttgtaaaattgtttggtggttgtagaatttggggaggtgtgggggttttggggttttgtatttttgttgattttgtttgggttttggagggtggtagtttggtgttttttgtggggttggtgttgagtttgtttgttggttttgttggtttggttttgttgtttggggttggggttgaggagtggaggttgttggttatggtgagtgaggttgggtatttggttgtttgttttggagttttgttttgaagtttggtgtgggggaggggtagtattttattaaggagaaattttttgtttgtaagtaagattttgtttgtagagtttttgttttgtttttgatttgataagtggattttggttgtgtgggtttttgagagttgagttagttgtgttaggagtgtgtgggggtgggggtgggggtatttgtgttgaggattggggagtttggttgagtggggttgatgtttgtttttttggtttttgggtgtatttgggagtgtagagttgagtggtgattaatttgtggttttgggttttttggtgtgtagtttgggtttgttttttgtttttttgtttttttttttttttgttgtttttttagtttagtagtgtagtgttttgttgagtgaattgtgtgggttagggttgttgttgttgttgtgtttttgggagtgtgggaagtgggttgaggtgggtggtttgggagttgtttttagttggttttttttgatttgggattgaatgtgtatgtgttattttttttttaagtattttgattagtgttttttttttgtagttgaggagttagagtgaattggggtttttaattttttgtgtgttggttttattgtgggttgagggaagagggtgttgtagggagattggttgatatagggtgtgattagtttggtttagtaagtttgagttaggaggagtttggttggatttgaggagtttgtttaagtgtgggatgtttttttgtggagagtaggttgttgaggtttgaggtgatttgttaatgtttaagtttttttaggggtagtgttgtaatgtgatttgtttggttaggtaaggtgtgggtttgaaaggtttggtgggtggaggtttttggaggggtttgggaggttatggtgggatttgtttttatgtatttggtttgttggtgtgtgggtggtttttaattttggtggaggttttgtgtttgttttgtggatttggttttggttgttgtttttttttttggtttaggttttgtttgggagttaatgattgatttattggttttgtgtggttggtgtttttttagttatttgtttaagttgaggagttgttggtgagtagtgtagtaggttaagagagtgggggttgttggggaagggaagttatgttgttgatgggaaggagaggttattagattagtttttatttggtggttttagttgtgttggggtaaatttttaggaagttgggtttgggtgaagggagtattgggaagttttatatgtaaatgggttggtagttggtgattaggttgtttgattttatgagttataatgggttttttgtttggtttttaatttgtttgttgtggatttggtgtgtttggggtttaagtggtggattattttggttgtgtagagggatatgtttttgggggtttaggttgttgaaggagttgagaaggattttttttttttttttgtagaaggtaatataaatattttaaattaaattgttttgataattgaaggttttatatagatatattaataaggattttgttttttgtgtatgaatgtatagaaatatttgttttatttttatgtaaatgatattatataaatagattttgtaggtttgggagaggggtgggaggaggaggggtgttgttattttagttagggggttgtgagaggggaggggtgttaaatttgtattttagggtttgtgttggtttgggtgtagtggggttggtattggttaggaggtttgttttgtgggtagtggttttttgttagtgttgttaagttggttgtgtttttaggttgtttgtagaggtggattagggaaggagtgaagtgagtttgtgattaattgtggggttttggattggagtattaaggttatgtgtgattgataggattgatattagtagaggatatggtgatgttttgtttaattgtaggtttaaaaaattgttgtttgagtagttttggtgtggagagttatggtttgtgtgttgagttagggagtgtgtgtgtttgggtgggggtgggggtttttgtttttttgttttaaggttggaatgtttggtgttttttggattgagggatttggtttttgtgttttttattttgttgggttgttttgttttgtgtgttgattaagtgtggttgagtttgttaggagagtatgatttagtttttagggttaggtttttgatttgattttttttttttaaatttgatgtttttttgtttttgttttagattttatatgggagggggttgtgtagttgggggtgatagattttaataaatttttaaaataaaaattatatgtatgaaagaaatatttttttttttttttttttttttattgattgatataaagttttgaatgattaaagggaaagaggtaagttggggttgtagggagtaaggttattgagtgttaaaattttggggtttatagatatgtattttgagttttttatttttggttatagtttttgtggtttagatttttttggagtattggggttttttgggggtgaagggagaagtgttgggaggttggtggttttgtgttggggagggggagtgggagggagtggagaatttagtgagagaagtttttattatgttttggttggttattgttaaaatttttggatttttttttgtttgtattgttttttgttgttattataagtttggtttaatgagagtttgggataaaagtaaatgttttttatagattttgaaaataaaggggaaagagatgtgtggggttgtggagaagtggttgttagtgtaatggtgttaggttgaaagtagagtattaaaattgtaaaagttgtgtgggtgggaggaagtgtgaggtgggaggtgggagtgtggggagggtgggaggtgggagtgtgggtgggggaggggtgttgtgttatgtttttgtgttatttgttgagttgttggtgttgggtttggttgttggtttttgtttgtttttgtaatagtagaaagtgtgtgattagtagttagataggtggggattttgggtttgtggggttgttgtatatgttgtttgtggtttgagtttgtgttttttgtttgttgggtaattattttttttgttgtagtgttgtgtgtatttttattagagtagggaggtttttttttgtgtatttgtttggtttttgttggtaaaataatgtttttttgggttgggttttgggttaggagagttggggagggtgggatggaggtggggggtgggtgaggtagggtaagttttgtaggttagttttgttgttggattttttttggatatggaggagatggggagtgtttattggtttttttttaggtggagtggtaaagtttgagttttgtagttgattttatgtttttatgtggaggggggtgggtggagtattggtgttgttatgatttatttttgttttttgttggaggttagagtagggttgagggggagatgagtgtgtttggtttggagagtgggggtggatattgggaaggtttttaaaataggttttgttttatttgttttatgaatgatttttttaggttagaagttggattttaggggtggtggttttttgatttttgaaaggagatttgggtttttagtaggttttttggttttgtgttttgttgtttgtagtgggtgggagatgggggtggttgaggtttggttgtttttggttttgagttttggagttttatttttttttttgtgatttttgtatataatagtaggtagttttttatagtagtatgtgtttagttgtagggtttgggagtaggtgtttttgtttggttggagtggtggttttgtgtttttttggttttagttgtggagttgtgagtggtgtgggggggtgtgtttatggtggtagtagagggatagggatattttattggattgtaggaagggtttttttggtttatattgggatattgtagggtttgggtggttgtttggggtgaggagggattaggggtgatgtgtggttagtttttgtttggaatagttttggggttagtggaggttgtttggggtggtgtgagggtttttggtttttgtgattgtggtggtggtggtggggtggttgtgaggagtatttttttttggttgttgttgttgtgtggtttttggaatggtgttttaggagtttttttgtgtttggtagtgttgtttttggtttgtgttgggatgggggttgtagggtggttttggtttagtttttatggggaggggtggggaggtggggtttggagattttgtgggaatggttgtgtgttttttagtattttttttttgttgttgttgttgttgttgttgatatggtgggtatgtgaagtgtagtttggtgttttggtgttagttagggagtggtttgttttgttgatttagtttatttgtgggtttaggaatgtggaattgagtttggttgggttttgtggagtttgtatttttgtttgtagtttgttgtggttttgtattttttttttgtttgagtttggttttggggttgtgttaggtggtttgtttgaggggaatttgggttgattaatgggatgtgtgtgggttttatgtgaggtttggttgttagtggatatttgtttgtttggagtttagattgtggttaagttttttggggaagggtgagaggaggggtttttttgttgggtggttttagttttttagggataatttgtttgtggtaggttttaatttttggattttgtagtttggtttggagatggtagatttggtatgtgttggatgttatggtgttgatttggttgggggtagggggtgggagttttggggttgtgagttgggggtgggtagaggttaggttagtttggtttggggtgtttgttttgaggtttgtattttggggttagttattgggttggggggaatttgtagggtgttttgaggttgtggagtttgatattaaaattttttttgataaagttttttggaaatttttttgtgaaatttttgtgtggaaagaaggatttttaaaattttttgagggtttggtttggttgggagtttttgggttttagggagtgtgattttttttttttttttttataggggtttataaatattagaagagtttttttttattttgtattaataattattttatgttgatatagttatatgatttttttaagtataattatttgtttagtttgaaggtattgagtgtgatggtgaaatataaatattgattagtaattaagagaaggaaaatttagttgtgagtttgggttggatataggataaatttttattatgtatttttggttttatttagtttaattgtattagtaattttgttttttgtgagaaagtttgaaattttgtagttgaggtgtgattttttttggggagttttgttaatggggggtgggttgttagtggaggggaggtgggttttaaatgttatttttaaatgaaaatttttttttttttttttttttttttttttttttttgatttagtttttgaaaagagtatttttgtgagataagaagtgattgattaaaattgttaaggggaggttgtaagtagttgttttgttttagtttagtgttattttattttttatatttgtatggtggaaaaaaaaattggtttatttttatttttattttttttttgttttaattgttaaaaaatattagtgtgttaaattgggaggaaggaggtttttggagtgttagtggaaaaggaagatttaaaaatgtgggtttttgggggaagtaagggtggtagaatttatttttttttttaggtttttttggtataatatagggtgtagtttagggtggaaggttgggtggttttttttttaaattattattttaagaataaaatttgggtttggttttgggttgtgtggtttttttaggttttgttttttgaatttttttttttttttattttttaaaagttgttggtgggtttgggttgaggttttttattttgtttttatttttttttttttagatatattttttttttggggagggggggatgtaaggttaggatatatagtttgttggaaattattaaaatatatgtgagtgtttgtaaatatatatttttaaattatggtgttttttttttatgttggtttatttaaattttagagtgagttggatttttttttttttagttgtttgtttgtgttattgataggttgttaatggttgggtttttaggtgttgtgtattatgtattagttttttttttttgttgtatatagaaggttttgttaggttgtattatataaattattttgagtttttttattttattttttgtatttagggttgggggttgtgtggttgttaatgtgttgggaatgtaggtatggagaggaggatgagtattgagagtagagtggtttggaaggtggaatgggagtgggtgaaatgtgttgaagattatattgtttggaatgtttagtttgttgtgagttttaaagttttgtttttggttgtgatttttttgaggtaattattttgtgttatttatttttgtgattgattttgttgggggtgggagggtagaggtatttagagatagattagtattgtttttttttttgttggtttgtatttatttttttgttgtaggtgaggggttggtagagttttttttatttttttagtttgggagtggtattgtgaaggggtttggggtggtgtgtttttgtagggatttggtgggagtggaggagggaagttggatataaaatggttggggttggaggttggtatattgggtttgaaggtgagtagttggtggttttttgtttttttttttggtggtttttatttattgtttttagttgggtaaaatatgtgtagaaggtgttttgttaaataagtagttgaggtgggatgtggtgtttgggtttatttgtaggagtatttggtttagtgtggtggtgttgagggtttttaagtttttgttgagtgtaagaggtggttagttttttagaagttttttgtattatgtttatttggttgatatttaattattttgtgggtttttgtagtgtagatgttagtttatttatatgtgtttgtgtttggggagtttagggtttgatttaaattgagtttagattagaaattttaagatggttgttaggaattatggagaggttgtttttagggttttttttttttaaatatttaataattttttaaaggttaggaagaagaaagaatagttatgtttagtttggtgatttttaagtttagtagttttttgttttgggaggtagttatttttagatgtttttagatgagtgaaattttgggaggaggatgtgttttttgtttgttattttgtttgagttttagaggggaagttagttgtgttttgtgtttggaggatggggtagtggatgttttttaaagtgttattggataagtttagagtttttgtataaagtgattagaagattataagtgtgggtgtgtttttaaagaaaggttattttatattatgtaaaaatatattatttgtatttatttgagttttatttgttttagtattaagtgttattgttttgagaatagtttttgaggaggattattggaagtttatatatatgttataagttttatgatgtggattttagtatatgttataaataaattttgtatataaggttagaaggttagggtttttttaaatataggatgtttggttttttttttaggttagggtggagttggaggtgtgtgggagaggttttagtgggttttgtagagttaatttgttttgagaagggtagttaggtttaaggtttgtttttagaagggttagtttgattgtttagttgtagggtttggttagtttgaggttgagtggtttgttataattaggagatatttttatgggaagggagattggtggtggaggggtagtttttgttgttttatttgtagtattttttattttggtatttatttttttatttttttgtgggttgtatggtttttttttttatgtatttttttgtttatttttttttttttttttgtttttattgaaattttttttttgttgagtgttgggtatagtagtttgatttttgggttagtttttgaagggtttgtgggagggtaggagaggagggggtaggagaagggttaaattgttggtatttattgtaggttttgtggtatttttagttttttgagtttttttttaagtgaggatataagatgggattgttttttgatagttttttgtttgttttttttagaataattggaattaattgggttaataggtgtaattttttttttttttttttgttttatagtgttttgggaaaattttatattttaatttttagtgagttatgaattttttttattatttatgttttttaggatttttttaataagatatttttgaaattttatggagttgaaaaatgtatttttaggagatggaggagaaattttttaattttattagtttattgtggaggtaagatttttagaaaaggtgggggaggatgttgtaaattatgttaaaggtgaatttattggtttgtttgtttttagtattaaattttttttttagttagttttttttttggtttttttgtatttatagtatttttattatttttgtttattttaattttaggattttttttttttttttttttttttttttttttttttgagatggagttttgtttttgttgtttaggttggagtgtaatggtgtgattttggtttattgtaatttttgttttttgggtttaagtgatttttttggtttagttttttgaattttaggatttttaaagttagataaataggtttttttgttagtagttttgggaggttgtaagattttgagaggttgtaggttttgagtttggtttttggattttttaaaagttttggatgtttatatgtgattttgaattttgagaaaagtttgtgtttgggggtagagttggggagatgaggggaggggatagaaggtggttgggtgttgggttagggtttttgtggtttggtttaattgagttggaagagtttggtatggttttatattggtttaggttagtttttttgtttagtttgtagtagtagagtggtttttttgtttggaattatgtttagagtttttttataaatatttagttttagtttttttggttatttttgatttgttttgaataaaaggagttgttttaaaaagaaatgttgttataatatataattagaggttttttttttagttgtgtttgtaatttgtatgtgtttaatttaataatttttaatgtttggttttaaaatgtttttataaaaaatagttttatagtataatagtttaggtgtttttttgtttgttattggagattaaaaaaatgtgtgggttggtttgtagagatatttatttttagaaagattaggaagaaaaaagtgtgtattttattttgtaggtgttggttttggaagtgtttgtggtttagtttggttgggtattgtttgtgggggtatttgtttgtttgttttttgtattagttgttataagtagttttggagtatgaagatttaattttgttgaagttttgggttttaaatggtagagatgttttatttttgttttgagaagggttgtttttataattatgtgttgagaattaaaatagaatgaataaaattgtatttaatattagttttatagttagtagtgagtttaatttttaaaagggaaaatatttgttagttagagttgattttggttttgattttgatttagtaattaatttgagatgtttttgattatttttggtatggggatattttaggatattttaaaaattttttgtgtggatttataagttatttttattttagatttatgttttatggagtttgtattattttgtttttaggtagaaagagatattttattttttttttagtataaaaagattttagtgggtagttgaatggggttattattggttgtgaagtttgggtttgtagtttgggtgtggttagtttggaatatttttttttttatttttatttttttttgttagttttattaattagggttttttggtttgtttttgaggttttgtgttttggggaggttggaattttgtttttttgttttttttttttttttgtttgtttttgttttttttttgtgtttagagttgtgttgggtgtgttggagaagtttaatatgtgttaattgaattgaattgttgtgggtgtaggttgtatgttgttgttaagtattgattagtatgatgttattgagtggaaatttatggggtgaatggtgtaagttaaaagttgttttttgttaaggaaaataaaatgtgggagataattttttaatgttggggtgaggggtttgggtagtttttttaattattagaggtatagattgtgaaaatgtttgagaattgggagaaatataggtggatttttgtttgttgattgttttttatatgttttttggtgtttttatgggttgtttttttttttttttatttttaaataatttttatataattgaaatgtttggggaatttgggtgtggagtttaggtggaatggttattgttgtttggggtggtgtttttaggtagtttttaatattgaaatgggaaagggtttttttgggaggaaggggtaaattggggtgggggtgagtatgggagtatataggttatgttttgttgggttttggaggggatgaggttgggagagtgtagtgttggtggtaagaggtggtggtagtggttgttgttgttggggtttgatagttttggttgagtggagtgtgaggtgttttatggtaattgtggttttttattggttttttgggtagtgaggggagttttggtgtgtggttgggagagttgtttttgttgtttttatttttttggttttggttttgttggtagtttttgttgttgttgttgtttaagttggtttttggtttgtttaggatgtgtgtttgggttgggtgtgtgtagttaatttggtttgagttggggaggggaggttgggggatgaggagggggggtgttatttaagtggtttggggtttggatttagagaggttaaaatgtgttgggttgtgtattgatgatggttggggaaatttgggtaaattttttttggggaattattttttttgaaattttgttgtggaggtgttgtagtggagggtgagtggagattggtggagtttaaatttgtgagagttggaggtggtggtgggtgggtggttgttgtttgagtgttgtgtttgtggggggaggggaggtggttgttgggagggagggaggtagggtgggtgggagggaggatgggtggagggagggggaggaggaagaggagggaattagggaggggggatgtgttgggattgtggtgtgtggtggtagatggagtttgggtttttagtggtaaggtgaggtagagttgtgttttttgttgaatgtgggttgagtttggtggttgtgggggagatgtgtaggagtttagattgtgattgagagtgggagttaggtgggtggtggtggtggagggggagtttgtgagttgttgggtggagagtttaagttgtgttgttgttgtgtagggatgatttggttaatatttatatatatttatatatatttagtttgagtgggtgtttgtggtgaattgttaatatggtgttggggtttttgtttgagtgtgggtggtggtggtagtgtgggagttgttgagtttggttaagtttagtttagttgtgggagtttggaggattgtatggggttgttgttatttgtttggaggttttgagtttgttttgttttgtttttatttggtttagagtttattttttggtggggttgattttgagggtagttggttgttagtagatggtgagggagttgagtgagtgtggtgttgtgagtgggttgtgggtagttggggattgtaaattttgttgtttgttgtgtttttttggtttggttttttttttgtttgttaatgttgttaattttttttattttttatatttttttttatttatttaattgttttttgtttttttttgttgttttgagtttgtttgggggaaaattttaaagagttggattgtaggttttttgtttatttttttattggggattttaggttagtgtttggaatattttttttttgggagattgtggatgggtgggtgggtgggtgtgttgagggttgtagttggtttttttttttggggtttttttttgtagtgtattttgtgaagtttttgttttgtgtttttttttggttgtttggtttgtttttgtttttattttatagttatgttatttaaaatgtagttaatttaagtggttttgtgtgggtattagggagggagggggtgtggttgggggtttggtgttttttggtgggttaggaggagagtagggagtttgtagagtggaagtttgtagtttgtgtgtgtttgtgtgtgggagtgtggttgttgttgagtgttgtgagttgggtggaggggggggaggtgggttggaagttgggaagttgggtttggtgttagtttgtgagtaggaaggggagggtagtgggttgttgtttgtttttttttttgatttgggaaagaattgtaaaaatttttagttgttgttattgttgttttgttttgtttttttgggggttggttgtttttttaagtggaatgttggtgtgtgtgtgtgtgagggtgtgtggtgagtgttttgggttgagttgagtttgatttgttgttgttgttgtgtaatttgggaggggagttttgtttttttttggtttgttttaaagtatgaattatgtggattaaaaaaaaaaattattaagaaattgagtagagtaaggggttttgatttggtttgtttgttagttaggttagatgttttgttttgtaaatgtttttttaagattataatttgtgattttttttttgtttttttttttttttttttttttgatgtttagtgtaggttttaagttatgagtttttaggggtgggtgtagaatgtgtttgtgtgggggtagtgttgtggagggagggtgggggtgggtgagatttgggttttttgttgggtaatggggagtttggtgggtagttttgatgggtgtgtgaaagtttgtggttggaggaagttggttttatttggagggtgtgtggtaaggaggttgtaggtgaagaggaatttgtgtattggggtaagatttttggttaaggtggggagggtgaggtgttgtggggtttgtgtttggagttggtgggtggttgtgttgtagagtttttgttaatttgggggtttgtggtggtggtgatgagtgtttgttgtttatggagagagttttggggtattgtgtgtggagtagggtggttgaagttatgtgtggttttggtgggttttttgttgtttgtatgtttgagtgggttttttttggggttttggagatggatgagtttggtagtgtgtaggttgtggttgggtgaggtgtaatttgttgttaatgaattttttttagaaagtttgtgatttttagttagaggttgtgagtgtttgtgtgttagggtgtgtgttgttggtgtttggagggtgggggtggggggaatggaagagtgaagaaggaaggaggagggttatgtgtatttagaaataaattttaaaaagaaattaatgtgttttaaataggtatttgtatagttttgttgtgtttagattagatagtttggggttttagttgtgttttttttttttttttttgttttgagaagatgttagaggaggggtagtgtggtatttggttttaggggtagttttttggagaaagatttttaaaatggtttgggagtaaagattaggaggaaatggtttattttagaaggtggtgggtggtgagtgtagatagatttgggtatttttggttatttgatattttttgtggtattggaaatggatattgtgggttgaaattaatttttatgaagtgttgggtttggttttgttaatagaattgtttgtgtggaaggtattttaattgttagttttaaagatttttgtatgtggatatttagggaatatgtttgttttttgattttgtttattttttttttgatttgttatttggtgtgggttttgtagtgttggtttttgtgtttattttgggtagggttttagtgtgtagagtggagtggggggggaaggtgatgattaatatgttatttaggtttaatttgaggttggtttttagtgtgtgggtatatattgttatgtatattaattgttttggggtgtttaggggagtgtgtgggttttgggtagtaggtgtttggttggtaagttgtggttggggtttggttggttttagtgttgttttttgaggtgttgttattagtaggtgattgagagttaattaggaagtgttttttggattaatgggttgtatagtttattagtgattttttttagttttttgtagggttgttttggtttttgttttttatataggttggggttttgttgtttaggttgtggggagtgttgttgggaagtggggaggggttggtagtgagggatggtggggaagtgagtgtaattttgtggggtggtgtgttgtgtgtggtgttttgaggtttgtgtagtttgttttttttttttgtttgtggttgtttttattgtgtttttaatttgtttttgtttgtgttgttgtttggttgtttttttttgttttttgtgtttattttttgttttttaagtatgatgtttgtgttttttgtttagtttaggattagataagataaaaataggattgtttagtgtgtggagttgtgattgtgttttggtagttgggttggtgggagtgtggggggttggagttggagaggatttgtggtgtgtttggagtggttagtgtttgtgggttttttatttttattttgtaggtattgttatgttttttgggttttgtttgttgtgaattgtgtgggttgggggatttgggtagggtttttgtgtttttgtgggtgttgttggtgtgttggtgatagattggtttagataggtatgtaggtttttttttggttgaaggattggaggggggggaggtgtggagatggtagtagattttgtgagttgtgagtgagtgagttagtttttgggtttagtgagttgggtggagggaaggttgtgggggttttttttaattttttaaaggttgtggtggggtagtgtaatagggaaaggggggtaaagagtttagtggaaatttttggaggtagagtagtttgtagtggggaggagttgtgagtttgggtttagggttttttttttttttatgtgtgtatggttatattttggtgtattgggtttgatttttttataaattaaatgtagttgttagatgatttagtttgattaggtattttttagttggggagttgtgaatatatataatgaatatttttattttaaaaattgagtttggaagatagatgtagatttaatgtttttaaagagaatttatgtgggtgtttaaggatgggaaggtttgtatatagttgtagttgggtggggtttttgattatgattgttgtagattaaggatttgagtttgaaatgttttgttagtatgtataggtatgtattgaagagagtaaagtggtttttgagttgtttttatataaatagatatatttttaattaggaatttgtgaggagttagatatgtgtaaggagatagtttttaaagaggagttggatattgatgtgttgtgagatttattgtttgtgtgtgtatatatatggttaatattaaattggtttaaaattttaatatatttttgtagatatttatttagttttttttttagtttgaaatgggtggatgggttattttatatataaataatttattattaatattttagttttttttttttttttttttttttttttaagagtttgtgattttaagggattttttgtttatatttaaattgtaaatttatattggtttggtttgggaaagagttatattataggtaaagtaaaaagaatggaagtagtatgaatgtttagattaagatgtgtgtttgaatgatatgtgttgagataaattaagatatttgggttttgttgtttaaatggaataagagatatataagagataaagaattggttaaggggaatgtaaatatgggtatgtaaatatagagatgtatagtgatattttgagagaaaaattttagattttgttgagttggaaattggggtagaatttttgtaagtgtgttttagagataatagtttatttaaaggtgtgaagagggttatttggaaatataaaaagtatttatatgtatatatttatgtttagatatataggttgaatgataaatattttttaatgtttgatgaagatttttttgttgagtgagtgagattgatttgggtatagaagagtgggttatataattatatttatatatttatttatagggaaataatgtgtttttggtttgaaggaaattgagggttatgttagtagtttaaaggatggatggtgtgtagtgaa

SEQ ID NO: 328 - DNA, 2264 bp, Artificial Sequence
  chemically treated genomic DNA (Homo sapiens)
gattagtttggttaatatggtaaaattttgtttttattaaaaatataaaaattagttgggtatggtggtgtgtgtttgtaattttagttatttgggaggttgaagtaggagaattgtgtgaatttaggaggtgtaggttgtagtgggttagagattgtgttattgttttttagtttgggtgatttttaggttaaattgtgtttgatataaaagtttatattgatatagattttttgatataaaagtttatttttttttgataggtttgattgatttttttttttataaagataaaagttgttttaatatttaagaggaattatattgtggtgaaaggggtgttatgaattttgggttttagtttttgtattatgttttagtgtgatattggattttaatttttttattattaaagttaatgggttattataatttttttagaagtagttttaatttttaaagataagattaaaaatattaatagtgtttgagtttttggaattgaattagtattggagttttgtttggttgttttttttttttttttttaagattaatgatttggagggaattttggtgagtttgagtttttgtaatttgttagggattaattagaagtttggtgagtagttagtaatataatttttgggtatttttttagttttattagtatatttttttttattttgtttttttttgttgtagttttttttaagtttatatttgtgtttttgttagttttttttgggattttattggtgttggtagtttttgggtttttgggtatagtggttgttttatttgatttttttgtttttttatttttgttggagggtgatttgtgggtattgtttattatggataggattggaggggagaggagattgtggagatgtttgaggtagaagtttggaaatttgagttgtataggttaggattttattttttgttgttgtgtagtgatgatattatttttattgtttttttgaggggttattttgaggtgtgtgtagaggattagaggatttattttaattttggtttggtgatagtgggaagtgggaaaattggatgtaaagagtttagattatggattttttttgttaggaaattagtatttgtgaaggagtgtagttttgtttattaaataatttttttttttttgtttgtttaaaaatgtaatgttagttaatttttttgttaattttttagagtaaagttgggggattgggagaaaatttagttttgttgtatggtggtgttgtggaatgaggttttttgggattggtaaatttttaggtaaggatttaattttgtatattttaattggtttgaaattgtgggtttgtgtgtatatagaattgttagtattttttttttattttgtaagtattttaataataaaaagttatatagtttgagtagaatttatttaatttatttatttatttataattattgattgtttattttgatttagaaatagtgttagtattagggaataaaatatatatagtttttatttaattaaatgattttttttagtttgttagtattgaagattgaggtttgtttttataagtttgatatttttttattagtttggttaattttattaaaattaagaggaaagtttaaagagaggaaggtgttttttttgaatgttttattttaatgaattagtttatgtattgggaggatgaagtggtgaggatatttttgttttaaaatttttttttttttttttattgagatatgagggggagggtgttttatttatttgggtatgattaggtttttgtatttattatatatttaatttatgtgtgttgaaagaatggatttggaaatgtaggtgtgtgttatatttatttttttgtttttatgttgtttggatgaattattgtattttttgttttaggagtttttaaaatttttggggaaggagtgtattttgggaggtgtgtataggtgggtttgtttgtttttttttatttgtataatgggggtttataaggtgttgtttttatgttttgagaggtgtgttttggtatagtaaagtttatttgtgttggtttgtggagttttgtttagttaggtgagttagggggtggggtgtgggggtgtggtgatgtgtgatgttggattttggaagtgatgtgtttgtggggaaaaggtagggagggggtggtgtttttagttggtttggggggtgtgttgtttggagatggaaagtttgggagtttgagtaggtttggttgtag

SEQ ID NO: 329 - DNA, 2264 bp, Artificial Sequence
  chemically treated genomic DNA (Homo sapiens)
ttgtagttgagtttgtttgggtttttaaattttttgtttttgggtaatgtattttttaaattggttggggatattattttttttttgttttttttttatgagtgtgttatttttgggatttggtgttatgtgttattgtgtttttgtgttttgttttttagtttatttagttgggtggggttttgtggattagtgtaggtggattttgttgtgttgagatatgttttttggggtatggggatagtgttttgtgggtttttattatgtaggtggaaagggataaataggtttatttgtatgtgttttttgaagtgtgttttttttttaaaggttttgggagtttttgggataggaaatatggtaatttgtttaggtagtgtagaaataaagagataaatgtaatgtgtatttatatttttaagtttatttttttagtatgtataaattaaatatgtaataggtgtggggatttagttatatttaggtgaataaaatgtttttttttttgtattttaatgagggaagagaagaaaattttaaaatagaaatatttttattattttatttttttagtatgtgaattagtttattaaagtgaaatgtttaaaggagatatttttttttttttaggttttttttttagttttaatgagattaattaaattgatagaaaagtgttagatttgtaaaaataaattttaatttttagtattggtgaattgaaaaaaattatttaattgggtagaaattatgtgtgttttgttttttggtattagtattgtttttaaattgaagtaggtagttaatagttgtggatgaataaatgaattggataaattttgtttgagttatatgattttttgttgttaaggtgtttgtggaatggaggggaaatgttagtaattttatgtatatataggtttgtggttttgggttagttgaaatatataaggttgagtttttgtttgaaagtttattagttttggggagttttattttatgatattgttatataatggaattgagtttttttttagttttttaattttattttgaggggttaatgaagggattaattgatattgtatttttagataggtgaaaaggaaaaagttatttagtaaataaaattgtgtttttttataagtgttggttttttagtgaggaggatttatagtttgagttttttatgtttaatttttttgttttttattgttgttaaattaaagttaaaatgagttttttagttttttatgtgtgttttaaaatgattttttaggagagtggtaggggtgatgttattgttgtgtgatgataggaagtaagattttggtttgtgtagtttgggtttttgagtttttgttttaggtatttttgtgatttttttttttttttaattttatttgtgatggatgatgtttatgagttgttttttgataaaggtggagagataggggagttggatgagatggttgttgtgtttggggatttgggggttattgatattgatggaattttagaggaaattgatggagatgtagatgtggatttgaaagaagttgtagtggaggaaggtgaggtaggaagagatgtattgatgaggttgaaggaatatttagagattgtgttattggttgtttgttgggtttttggttagtttttaataagttatgagaatttgaatttattagaattttttttagattgttaattttgagggggaagagaggggatgattaaataaaattttagtgttggtttggttttagaggtttaagtattgttaatatttttagttttgtttttagggattaaagttatttttaagggagttataatagtttgttggttttggtggtgaggaaattgggatttaatgttatattgagatgtagtgtaagagttaaaatttaggatttgtagtattttttttattgtaatatggttttttttagatgttaagataatttttgtttttataggaaggagggttgattagatttgttaaagggagatagatttttatattgaaaagtttatattgatatagatttttatattgaatatgatttaatttgagagttgtttgggttggagaataatggtgtgatttttggtttattgtaatttgtgttttttgggtttatgtgatttttttgttttagttttttgagtagttaggattataggtgtatattattatgtttagttaatttttgtatttttagtagagatggggttttattatgttggttaggttggtt

SEQ ID NO: 330 - DNA, 2346 bp, Artificial Sequence
  chemically treated genomic DNA (Homo sapiens)
gattttattttaaaaaataaaaaataaaataaaattaaaaagttaataaaaataaaaaatggttaggtgtggtggtttatatttgtaattttggtattttgggaggttgaggtgggtagattatttgaggttgggagtttaagattagtttgattaatatggagaaattttatttttattaaaaatataaaattagttgggtatggtggtgtatgtttgtaattttagttatttgggaggttgaggtaggagaattgtttgaatttgggaggtagaggttgtggtgagttgagatggtgttattgtattttagtttgggtaataagagaaaaattttattttaaaaataataattaaattaaaaaataaaaaataaaaaggtagatatttgaagatatatgggatgtatgttggggaggttttgttgttattttttgtttttagttttgtttataatgtgtatttgggggtttagaggtggtatagttttgtttgtttgggtaggagggtttggtgttgatttggtggggtttggtttttttgagtattttttataagggtttgattgtgggtgaggggtgtagggagtagttggttttaagttgggtattgttttgtgagtttgggggtagtttagggttttttagattatattgtttaggttggggttggttttgttggttgagtgggtttttgtttttatgggattttgttttgtagttgatttttaaggttaaggaggttttagtggggtggggtttggttttggatgtggttgatgtgtgttggggttgtttggggtttaggtgttgtgttttgtttttaggagttggaatagtagtttatgatggagaaaagaaattattgtaagattttgaagttttattagaaatttttatagaaggaaaagaggaataaaggtaaggtttttgtgggtataggtttgagattttggttgtaggtagtttggtttttatttattttgttttatttataggttttgatgttaagattatgttgtttaagttgaaagggtagttagaagaaatgaaatttagggtgtaattttttagtttggttaagaagtatttgtaggtaagtgggttttgggttttgttttgttttgtgaggtagtagttttagatgggttttttattgttggatgttgtaaatttgtttgtgtgaagttataaaaggggttttgatttgagggtttaatgttaggaagttttggggtgaggggtagagtgattaagtgtttgtgttttgttttggtaggttatgtatgtggaatgttggggtttggagttttgtatttttttagtgattgtgaatattgtggttgtattttgtgatatgttggattttagttttttggatgagttttttttgtttattttttataatgttaataagtatttgggtggttggtagaaggtttgtattttgtaggttggtatgttgttggggtttatggtttatttgtattttaggtgtgttgggagaaaagtttatttggaaaaggagatgtagtttggggtgttgagaagagggggggaatgtgtttttgttagttagttaggttgggtttgtattttttagtttagagaaatgtttaattggggtttaggttaatgtgtattaggtgttattggtagttttgtagagttttggttagagtggtttttgttgtttgtgggtttgggtattaggttttagggtgtgtttggtggtttttggaggtgttgtggaattgttttatataattaatatatggaatggtttttaaaaataatatgtataggtagtttggtgatgtggtttggattttatttaatttattgagttagaatatttggggtaattagttttagggatgggtgaggttggggtgtttttgtagttttttttatttggtgtgtatattggtttaggagatttttgatttgtaaatgttggtgtgtgtatgtatgtttgtagtagggaggagttgttgggtttatttatttttattagggttatagggttagatttttggttgttttattagtttttttggttttttatttattttggtttgtatgggtttttgggttgtattttgtttttaggtattgggagttgtagtaggttttggatttattggtttgattagtttttagagaggttattttgttagtgattggggttaattttatgttggtttatgggatttttatgatattattttggagttttaagggttttttttgagtagaggttatggggtttagtaaaggatgttaaggaggatagtagggagttagggtttttagtagttagtggggataggtaggtttttagaga

SEQ ID NO: 331 - DNA, 2346 bp, Artificial Sequence
  chemically treated genomic DNA (Homo sapiens)
tttttgggggtttgtttgtttttattggttgttgagagttttggttttttgttgttttttttggtgttttttgttgggttttatggtttttgtttagagaggatttttggggttttaaggtggtgttataagggttttataagttaatatggggttggttttagttattggtagggtggtttttttgggagttggttagattagtgggtttagagtttgttgtagtttttagtgtttgagaatagggtgtagtttaggggtttatgtaggttagagtgggtgaagggttaagggggttggtggggtggttgggggtttggttttgtggttttggtggaggtgagtgggtttggtggtttttttttgttgtaggtgtatgtatgtatattagtgtttatggattaggggttttttgagttagtgtgtatattgagtggagggggttgtagaaatattttagttttatttgtttttggagttaattattttgggtgttttgatttggtgagttggatggagtttaggttatattgttgagttgtttgtgtgtgttatttttggaagttattttgtgtgttaattatgtagggtggttttgtagtatttttggggattattaggtgtattttgagatttggtgtttaggtttataggtggtggaggttattttggttagggttttgtaaagttgttggtggtatttagtgtatattggtttaaattttgattaaatatttttttaaattaaaaagtgtaaatttagtttagttgattggtgagggtatgttttttttttttttttagtattttgggttatgtttttttttttgggtgagttttttttttaatgtatttggagtataggtaggttatgagttttagtggtgtgttggtttgtaggatgtgggttttttgttggttgtttgggtgtttgttgatgttgtagaagatgagtgaggaggatttgtttagggggttgaagtttagtgtgttgtagggtgtggttgtgatgtttatgattattgggagggtgtagggttttaggttttagtgttttgtgtatatgatttgttggagtgggatatgggtgtttggttattttgttttttgttttagggttttttggtattggatttttaaattagggttttttttataattttatatggatagatttatagtatttaatagtgggaggtttgtttgaagttattgttttatggggtagagtggggtttggagtttatttgtttgtagatattttttgattaagttgaggaattgtattttggattttattttttttagttgtttttttagtttggatagtatggttttgatgttggaatttgtgggtggagtagagtgggtgggggttgggttgtttgtagttagggttttggatttgtgtttataggggttttatttttgttttttttttttttttgtaagagtttttggtagaattttagggttttgtggtagttttttttttttattatgagttgttgttttagtttttggggatgaaatatagtgtttaagttttaggtagttttaatatatgttagttatatttagggttaggttttattttattggggtttttttggttttggagattagttgtagggtagggttttatggagatagaggtttatttagttagtgaggttagttttggtttgggtagtgtggtttggggggttttgggttgtttttaggtttatagggtagtgtttagtttggggttgattgttttttgtgttttttatttatagttaggtttttgtgggggatgtttaggggaattaggttttattaagttagtattaggtttttttgtttaagtaggtagggttgtgttatttttgggtttttaagtgtatattgtgggtggggttgggggtagggggtggtagtgggatttttttaatgtgtattttgtgtgtttttaggtgtttgtttttttattttttattttttaatttagttattatttttgagatggggttttttttttgttgtttaggttggagtgtaatggtattattttagtttattataatttttgttttttaggtttaagtgatttttttgttttagttttttgagtagttgggattataggtatgtattattatgtttggttaattttgtatttttggtagagatggggtttttttatgttggttaggttggttttgaatttttgattttaggtgatttgtttgttttggttttttagagtgttgggattataggtgtgagttattatgtttggttgttttttatttttattgattttttaattttattttattttttattttttgagatgaggtt

SEQ ID NO: 332 - DNA, 3106 bp, Artificial Sequence
  chemically treated genomic DNA (Homo sapiens)
ggtgggtgttgttgagtatggggaggtgttgaaatagttttggtgtgttgatttaagttttgattggtagagttatttggtgattgatagggggtttttatggtgtttgtgttgttaatttgtttattttaatagtggagttagtttgtttgttggtgtgtttgagttgagttgagtttgaattttaagttgtggagttagtattttttttagttggggttgtttgtttttggttgttgagttattgttgttatttggtagtgtgttttgttgttttaatttgttttattaataagtgtttggtatatttagttaggtttgtgggtatttgttgtgtgttttgttttgggtttagtgtttttgttgttgttggtattgttttgatgttttagttgtttattttgaattttagtttttagtaagtggttggggtatgtgagattttggaagagagtggtgatgtggagtgtttgggttgttttttttggttgttgtttgtggtttttgtggtttgtgaggtttttaataagaatgagttggtgttatgtgtatgagttattgtggttttttatggtggtaattattgtgagttttattatattttggaaaattataagtttattaaggagttgtatgttaagttgtaggtgttgtggtttgaagtatattattaggaggttgagaagttgtgtggaagatttttgggatttgtggataagtattgagtaaggaagaagtttttgttgttgtgtattatttgggatggtgaatagaagatatattgttttaaggagtgtatgtggtatttgttatgtgagtggtatttgtaggatttatattttaattttagtaaaaaatgtgagtttgtttaggtaattggattgatttttatgtaggtgggtaattggtttaaaaattgttgataaagggattgagtggttgtagttaagaataggttggtatttagaggtttttgtgttttgagtgtattggggaggaggtgggtggaggtatttttggtgtttttatttagtttttggtgattttaatttagtaggagttgggagtgtggtttgttttgggttaagagttttgtgttttgggtttttggttgggagtttttttgttggttttgtttttttatttgttggttttttatgtttgtgggtagttgtagtagttggttttggttattaaattaaggttttattgggatggagaggggaagagaaataaaaaattaaaattttataaatagttagggattttaagatttaaagttaatttttgttagtttgggtataggtttttattattaattgaagtttggtttattagtaatgtgttggttttatgttaattattatttttaaagtttaggtatatttttttttaatgttttgaaaatagtttttaatggatttttgagaaatgggaagttgagtttttttttttttatgtgttgtttgttatttttgttttaaaatagtaaattagtttgtgggttgaggttttttgttttttggagtgtggattttgattagttaaatattttgtggaagagtttggttttattttttaggtttaaatgttttttataattttttttgtttttaggttgggttgatttgatttaatgtgattgtgggagtatttgtttaggtgtaagttttaggtagatgtattgttagaaatggtattttatgtttttgggattgatttgtttttgttatttatattttgtttattttttgatagttttgtaaattttttaaaagtgtataataaatagggaggatattgtaagtttagtatataaaagatttgggagttgtggtgttgagaaagggtgtgaattatggtggggtataatagtagggatttgtggaggggtggttgtggatttttgtttgatttttgttgttttgttgagtaatttttgttttaattgttggggtttttggaagaatttttagttgttgggttggagggatgtaggaggtggtgggggtgggtgatgggtggttgtgttatgagttgtgatttgtgtttttttttttttttgtagattttagtagtaggttttgttatagggttttgggtgggtattatgggtggagggtgatggtatgttagaggtgttgggtgttgttattagtttggttgttagtttatttagtaaggtggttattttagttatttttattatgtttagtgatagtgagtgtgatatttgagttgtttatttaggatgtttagaagtagattttagtgtaaaaatgagaaaaataaaatgaaagaggggaagaagatgagagatttgtaaatttagtgttatagaagttaggtgattagggatttgtgggtttgggttgttgttttttgttttattttgtggttggtttggttttattggtgttttttggttgtgattatgggaattagtggtgaggtttgatttagtattatgttttttttgttttgtttttttttaaggattttgttgtaaagtttttttggaatttgaattgtaagttgagtgtttgtttagatttttttatgggtattttatgttgaaaggatgttgttatatatgtataatttttgttttaaagtttttttttaataaaatatatatatgttgtttatttatttatttaagagattgttatggtaggtttttttgtagtttggggaatttgttgtttttaaatatgtaggttggtggtgatgggttttgtgtggagaagttaaataataaaataatttagtgggtaatttttttaattaagggagttgtttttagattttttttttttttattattattaatattattttttttattaggtatgtagggatttttgagtaaatggtttttggaaggttttatttatatattttttgttttttttggtgttttttggtatatgttttaaataatttatggtaggtttataattattttttatgttaaattatatgtatgtgtatatatgtatgtatttatataaatatatgtatgtatttatataaatatatgtatgtatgtatatatgtgatatatttaaggttagaaattggtaatatgtgagtgtttttttta

SEQ ID NO: 333 - DNA, 3106 bp, Artificial Sequence
  chemically treated genomic DNA (Homo sapiens)
tagagaggatgtttatatgttgttaatttttagttttaaatatattatgtgtatgtatatatatatatgtttgtataggtatatatatatgtttgtataggtatatatatatatgtatatatgtgtaatttgatgtgggaggtggttatagatttattataggttgtttaaaatatatattaggaagtattaaagaaggtaaaagatatataggtaagattttttggagattatttgtttaagggtttttgtatgtttggtgaagggaatgatattaataataataagaagaaaaggaatttgagagtagtttttttaattaagaaggttgtttattaggttgttttattgtttggtttttttatatagaatttattattattagtttgtatgtttagaaatagtaagttttttaagttatagagaaatttattatggtggttttttaaataagtaaataaatagtatatatatgttttgttaaaaaaaaattttaaagtgaaagttatatatatgtaatagtgtttttttgatgtgaaatatttatgggagaatttgggtaggtgtttagtttgtagtttgggttttgaagagattttgtagtaaaatttttaggaaaaagtaaagtaagaagaatgtggtgttgggttaggttttattgttggtttttgtggttgtggttaaagggtgttagtgaagttaggttggttgtggggtggggtgggaaatggtaatttgagtttgtgggtttttggttatttggtttttgtggtgttggatttgtaggttttttatttttttttttttttttattttgttttttttgtttttatattggaatttgtttttgagtattttggatgggtaatttagatgttgtatttgttgttgttggatgtgatggagatggttgaagtggttgttttgttggatagattggtggttgggttggtggtgatgtttagtatttttggtgtgttgttgttttttgtttgtagtgtttgtttggaattttgtgataggatttgttgttggagtttatggggaagaaagggaatatgggttatagtttgtaatatagttgtttgttgtttgtttttattattttttgtgtttttttagtttggtggttagaggtttttttgaagattttagtagttaaggtgaggattatttggtaaggtgatagaggttgggtaggagtttgtggttgtttttttgtgggtttttattgttgtgttttattatgatttgtgtttttttttagtgttgtagtttttaggttttttatatattgggtttgtagtgttttttttgtttgttgtgtatttttgggagatttataggattgttaggaaataaatgaagtgtgggtgataaggatagattggttttagggatatgggatattatttttaatggtgtgtttgtttggggtttatgtttgagtaagtgtttttgtgattgtgttggattgggttggtttgatttaaaggtaaaaaggattgtaaggagtatttgggtttgggggatgaggttgggtttttttgtaaaatgtttggttaattgagatttatattttgggaaatgaaaagttttggtttatggattagtttgttgttttgagataagagtggtaggtagtgtatgggaagaggaaaatttgattttttattttttaaaagtttattgaaaattgtttttaaagtattagggagggatatatttgggttttgaaaatgataattaatatgaaattgatatattgttaataagttaggttttgattaatagtaggagtttgtgtttaggttgataagaattagttttgggttttggggtttttaattgtttgtaggattttaattttttatttttttttttttttttgttttagtgaagttttggtttggtgattgggattagttgttgtagttgtttgtaggtgtggggagttagtgggtggggaagtagagttggtaagggaatttttggttaggagtttagaatgtagggtttttaatttaagatagattgtgtttttaatttttgttgaattggagttgttagggattgggtaagggtgttagaggtgtttttatttgttttttttttggtgtgtttaaagtgtggaggtttttaggtattgatttgtttttggttgtagttgtttggtttttttgttggtggtttttgaattagttgtttatttgtgtaggggttagtttggttgtttgggtgagtttatgttttttgttggggttagggtatggattttgtaggtattatttgtgtagtaggtgttgtgtgtgttttttgaagtagtgtgttttttgtttgttgttttaaatggtgtgtggtagtgggaattttttttttatttggtatttgtttataggttttaggggttttttatgtagttttttagttttttggtagtgtgttttaagttatagtgtttgtagtttggtgtgtgattttttggtgaatttgtggttttttaggatatgatagagtttgtggtagttgttattgtgaaaggttatgatggtttgtgtgtgtagtattgatttatttttgttgagggttttgtaggttgtaggggttatgggtagtgattagaggaagtgatttaggtgttttatattgttgtttttttttagggttttatatattttggttatttgttgggggttgaaatttaagatgggtagttggaatattgaggtagtgttggtggtggtgagggtattgagtttggagtgggatatgtagtagatgtttgtgggtttggttgagtgtgttaggtgtttgttgatgaggtggattggggtagtgggatatattattgggtggtggtggtggtttaatggttgggagtggatgattttgattggaggaggtgttggttttgtggtttggggtttgggtttggtttggtttaggtatgttggtaggtgagttggttttgttattggggtgggtggattggtggtgtgggtgttatggagattttttgttagttattgggtggttttgttaattaaagtttgaattagtatgttaggattattttagtatttttttgtgtttgatagtgtttgtt

SEQ ID NO: 334 - DNA, 2508 bp, Artificial Sequence
  chemically treated genomic DNA (Homo sapiens)
ggagaggttggaaaaatgagttttgaaattgtagttttataaaagtaaaattgagaaaagatataatagtgatggagaaagttagatgggtattaaaaaataaaataggagttttttttaggttgtgtttatatgggtttgttgtgtttgtttgttattattgatattttattttttgttttttgtatgggaggggtaagaatgtgatttgtttgtagtttttaggtaggtgatgaggatagttagttttgtggttttttgttagttggtggtgggggttggttaggtgtttggattttttgagggttttattgttgtgtgttttggggattgggattgttatttgtgttttatttgtgtgtttgggttttagggttttgtttttgggtggtggtgtgggtttggtttttgttgtagttatgattgtttttattgtttttgttgtttttgtttgggaagtggtgagttggtttggtttgttttgtttgttttttggtttgtatttatgttttatattgtgtagtttggtttgttttttttttagtttgtttttgaggtttttggttttgttttttagtgatgttagtgttttgtttttgtgtagttttttggttgttatttttgtgtggggatgtagtggagagggaagtggagagtgggaatgtgttgagttgtggtgggtgttgttttagtagttgtttttggttttgagtattgttttgtggttttgttttttgtgatgatgttagtagttgtgggtttggttgttgtgtttgagttttaagattttgtatttgggtgtgtgttttggtgtagtgtttggtgtgatgtttgtgttagttttttttttttgggagaggtagggagtgtgatgtttattttattagtgggtaaattgtggtttagggatgttgggtgatttgtttgaggatgtatatagagggaagggttaagttgggattttaatttgggattttttgtttttggggagattggtgaggtttttgtgatatggtttttttatttttaagttttttgtgtagatttttgttttgtgggatttgattgtgggttgtgggtttgtggtttttgtaggtagagagaggatgggagaggagatggttatgaggtttggttgtaggtagttatggtgtttttttaataaggaattggaaattttttttgtttgttgatttaaatatataaaaataaaattagttgttgggtttttagatggagtttttgtggtattaggaggtttatttttatttttttttttttttatgtaggaattaggtttttggtttgggggtggtaaaaggagatggtggtgggttaagtgggtgtgtaggtttagatttggggtttttgagtttatgtttaggtattttggattttttatttttgaggttattttttgttttttagaatgaagggttggtatagttttgttaggatgtatgtttagtgatttttgttagattgaagtattttttttttgtaagtgtttgaagtgtgagaggtattgttttaagtgttttaatttgtatttgtttaatttttataggagttaatttgaatgggtatatttatttttattttatagaagaggaaattggggtatagaaagattgagtaattgtttagggggtatgttttaagaaagagggagagataggatttggatttagataggttggttttttagtgttttggattttggtgtggatgatttaatttaagttttttttttttttttttttatgtgattttgtatgtgtttgtgtagagaatgagaaggtagattaaagttatagatgttgtgagaatattgttaagtagaattttgggtgttgtttttatttttttgtatttgtttttttttagagaagttagtttttatttgttgttttgggttttttttatttgagaaaagttgaaggtatttgatgttaatttgtatatagttgttttgtaggttagagtttgggattttttgtttttttatttggaaaagtttttttataggatttgttttataggattgttatgagaattaagtaagatggtgtgggttgggtgtggtggtttatatttgtaattttaatattttgggaggttaaggtgggtgtattatttgaggttaggagtttgaaattagtttggttaatatgatgaaattttttttttattaaaaatataaaaattagttgggtgtggtggtatgtgtttgtaattttagttatttaggaggttgaggtatgagaattgtttgaattttggaattagaggttgtagtgagttgagattgtgttattgtattttagtttgggtaatagagtaagatttaaaaaaaataaaaataaaaataaaaataaaataaaaaaaggtaagatagtgtgggtgaagattttagtagatttttttgtatatagtagatgtttatttattgttagtttttttttttgtttttatttgtataataataggtttatttgttgttgtttt

SEQ ID NO: 335 - DNA, 2508 bp, Artificial Sequence
  chemically treated genomic DNA (Homo sapiens)
ggaatagtgataagtaaatttattattatatggatgggaatggaaaagagaattagtagtgaataagtatttgttatgtatggagaagtttgttaaagtttttatttatattattttatttttttttgttttgtttttgtttttgtttttgttttttttgagttttgttttgttgtttaggttggagtgtagtggtatgattttggtttattgtaatttttgattttagggtttaagtgatttttgtgttttagttttttgagtagttgaggttataggtatgtattattatgtttgattaatttttgtatttttagtagagagagggttttattatgttggttaggttggttttgaatttttgattttaggtgatatatttattttggttttttgaagtgttgggattataggtgtgaattattgtatttggtttatattattttatttaatttttataataattttatgaagtagattttatgaagaagtttttttagataaggaaatggaggattttagattttaatttgtaaaataattatgtatagattaatattgagtatttttaattttttttagatagagaaggtttgggatagtaagtggaggttggtttttttgggagggagtaggtatagagaggtggggatagtatttaagattttgtttggtgatgtttttgtagtatttgtaattttgatttgtttttttattttttgtataaatgtatgtaagattatataggagggaaaaaggagaaggtttgagttggattatttatattaaagtttagagtattagggagttagtttgtttgggtttaaattttgttttttttttttttttggagtatgttttttgagtaattatttagtttttttgtgttttagtttttttttttgtaaagtgggaataagtgtgtttatttaagttgatttttgtgaggattaaataagtgtaaattaaagtatttagaatagtgttttttatattttaggtgtttgtggagaggggatgttttagtttgatagaagttgttaaatgtgtattttggtagaattgtgttagttttttattttaaagggtaggaggtggttttagaagtgagaggtttgagatgtttgggtgtgggtttagaagttttaggtttgagtttgtgtgtttatttgatttattgttatttttttttgttgtttttaggttagggatttgatttttgtgtgaagaaaagagaaaataagggtgggttttttaatgttgtagagattttgtttgagaatttagtaattagttttatttttgtatatttagattaataaatgaagagggtttttggttttttgttgggggagtattgtagttatttgtggttaagttttgtagttgtttttttttttgttttttttttgtttgtaggagttatgggtttgtagtttgtaattaagttttatagagtggagatttgtatgagaggtttggggatgggagggttatgttgtgggggttttattggtttttttagaagtggggagttttgagttggaattttggtttggtttttttttttgtgtgtgtttttgggtaaattatttagtatttttaagttatagtttgtttgttggtaaaatgggtgttatattttttgttttttttggaggagagaggttgatgtggatattgtattaggtattgtgttagagtgtgtgtttaggtgtggggttttggggtttaggtgtagtagttgggtttgtagttgttggtgttattgtggagggtggggttgtggggtggtgtttggggttggggatggttgttggagtggtgtttgttgtggtttagtgtatttttgttttttgtttttttttttgttgtgtttttgtgtgaagatggtaattgaggggttgtatgagaatgagatgttggtgttgttgaagagtgaggttgagagttttaagggtaagttggaggaggagtgagttaagttgtatgatgtggagtgtgagtgtgggttgggaggtgggtggggtaagttggattggtttgttattttttgggtggggatggtgggggtggtgggggtggttgtggttgtgatgggagttaggtttgtgttattgtttgggagtagggttttggggtttgggtgtgtaggtgaggtgtgggtagtggttttgatttttgggatgtgtggtggtggggtttttggagggtttgggtatttggttgatttttgttgttagttagtggaggattgtgggattagttatttttattatttgtttggaagttgtgaatggattgtgtttttgttttttttatgtggagggtagggggtggggtgttggtggtgatgagtgagtgtggtgagtttgtgtaggtgtggtttaggagagatttttgttttgttttttaatgtttgtttggttttttttattattgttgtatttttttttagttttgtttttatgagattgtaattttaaagtttatttttttaattttttt

SEQ ID NO: 336 - DNA, 2535 bp, Artificial Sequence
  chemically treated genomic DNA (Homo sapiens)
ataatggttttttggaattttttggaataaataagataaattaatatattagagttggtagtgggggtatattgtgtttttttagaaaaggattaaggggagtggttttagtaatggaatatgagggatttttttatatggatataaagtattaagggataggttggttttgttttttgtttttttttagttgtttaattaggatttatttagtttatagtgttttattttattgggtttttttggagttagttggagatgataaaaattatataggtattggagttagatagttttatatgttatttttatttgagaaatttgggtgagttatatttttttaggttttagtttttgtatttgtagaaggaagagaagataatttatttttaaagtgttgtgataatttagtgagatgatgtttgttaagtttattatatagggtaagttggtttttttttgttttttgtatttgtttttattgagggtgaaggtagtagagaagatattattagtagttgtttattattgtttggttttggagagggagggattatgtatttttatttaattatattaggttgttattgtttgtatgtattttgtgtttaattggggttttgaggtagtgttttgttttttttggatttttttagatattttaggttggaatggtgaggggtaggtgggagtagttaggtttttttttgggtaagttgtggtgagttatttgtttattttgtagtgggaggtggttgggtttgggggttttattgttagggtttgatttagagggtagtttggagttgttgggttgtattattatgaagatttgtttgtgtagaagtttgttgggttgtttggagtaggtttttttgtggttttttgatgggtgtgggtagaggtgggtgtggaaggtggtttggaagttgtggtggaagtttttgttgaagtagttgtagatgatggggttggtgttgttgttgaagaaggttagttagtgtgtgaaggggaaggtgtagatggtgattaggtgtagttgtggtgtgttgagttgtttgtagttgatgagtagtagtagtgtttagagtggtagttaggatagtgtgaagaatagtgttattatgattagtatgtgtattatgtgtgttttgtgttgtgatgtttgtgggtttgtagtttttttgtttttgggggttgggtttggggtttggtagagtttgtgtgtgatgtgggtgtatatgattatgatgagtgttagtggtgttaggtagatgtgtgagaagagtatagtggtgtagattttgtgtatgttttttttgggttaggttttttagtaggagtagagtgggtaggagtggttgtgggtgtttattatgaagtggtgttttttatgggtgatggttagtgtgatggttgagggatatatgatgagtagtgttagggtttagatgatggtgatggtgatgagtgttttttgtagggttagttttttgtggaaagggtgtatgatgtagtggaatttgttgtggggagagagataggtgggatttgggtgggttttagggtttttgtgaggggatggtgggtgggatgtgggtatttgatttttattattgtatttagggtggtgttgaagaatagtttagatttgaattggttgagtagttaaagaataaaggtagttataggatttatgagaagggaggaggaaattgtagattgtgtgggaataatgaattttgtgtgtatttttgtattttttttttttttttttttttttttttgagatagggtttttttttgttgtttagtttggagtgtagtggtgtgattatggttttttgtagtttttattttttgggtttaagtgattttttttttttattttagttttttgagtagttggaattataggaatgtgttgttattttgttggttaattttttttaatttttggagagatgaggttttattgtgttgtttaggttagttttaaagttttgggtttaagttattttttggttttggttttttgaatttttgggattatagatatgagtttttttgtggggttatttgtgtatttttgggggttaattgattagttggtagttagtagagtgattagagtgtgtagtttgtttttgataaggatgattaggtgtgttaaataatatagtttttgtttatggattttttagaaaattttaggaggttagatgtagagtttatatgttaggttgtttttatgttattttggttatagtattagtatttttataatgtaaggataagtttgtattatttatttttttatgaggataatttagtatttgttattatattttttattattttttaaaggtgaggtttttaagatagttattatattgttgatttatagataaggaaattgggatttgagtgttaagtagttggtttaagtttatatagtaagttgtaaggattagttttgaatttagatttgttttgttttatatgttatataaattagtagttgtaaatttttta

SEQ ID NO: 337 - DNA, 2535 bp, Artificial Sequence
  chemically treated genomic DNA (Homo sapiens)
tggagggtttatagttattggtttatatggtatatgaagtaagataaatttgggtttaagattggtttttgtaatttgttatgtgaatttgagttaattgtttaatatttgagttttagtttttttgtttgtaaattaatagtgtagtaattattttaaaggttttatttttaaaaaataataaagggtgtaataatagatgttgagttgtttttatgaggaaataaatggtgtagatttgtttttgtattgtagagatattgatattatggttaagatgatatagggatagtttgatatgtaggttttatatttgattttttgaggttttttggagaatttataaatagaaattgtgttatttgatgtatttaattgtttttgttgaggatagattgtgtattttgattgttttgttagttgttagttaattagttgatttttaaaagtatataaatggttttgtaaggaggtttatatttataattttagaaatttgggaggttgaggttggaggatagtttgagtttaagattttgagattagtttgggtaatatagtgagattttatttttttaaaaattgaaagaaattagttggtgaggtggtagtgtatttttgtggttttagttatttaggaggttgaggtgggaggagaggattatttgagtttgggaggtggagattgtagggagttgtaattgtgttattgtattttagattgggtgatagaaggaggttttgttttaggaaaaaaaaaaaaaaaaggagaaaagtgtaaaagtgtatataggatttattgtttttatatgatttgtggtttttttttttttttttataaattttgtagttgtttttgttttttgattatttagttaatttaggtttgagttgttttttgatgttgttttagatgtgatgatgaaggttaggtgtttgtattttatttattgtttttttgtaggggttttaggatttatttagattttgtttgtttttttttttgtggtaggttttgttgtattgtgtattttttttgtgagaagttgattttgtggaaggtgtttgttattattgttgttatttgggttttggtgttgtttattatgtgttttttggttgttatgttgattgttatttgtgaggagtattattttatggtggatgtttgtaattgtttttatttgttttatttttgttgggaggtttggtttgagaagggtatgtgtagggtttatattattgtgttttttttgtatatttatttggtgttgttggtgtttattgtggttatgtatgtttgtattgtgtgtaagttttgttaggttttgggtttggtttttgggggtgaggaggttgtggatttgtgagtattgtggtgtagagtgtgtgtggtgtatatgttggttatggtggtgttgttttttatgttgttttggttgttgttttgggtgttgttgttgtttattgattatgggtagtttagtgtgttgtagttgtatttggttattgtttatgtttttttttttgtgtattggttggttttttttaatagtagtgttaattttattatttatggttattttaatgagaatttttgttgtggtttttaggttgttttttgtgtttgtttttgtttgtgtttgttggggagttataaggaggtttattttgagtggtttggtgggtttttgtataggtgggtttttgtggtggtgtggtttagtgattttgggttgttttttgagttgggttttagtagtggggtttttaggtttggttgttttttgttgtggaatgggtgggtggtttattatggtttgtttagggaagggtttggttgtttttatttgttttttattattttagtttgggatatttgagggggtttagggagggtgggatgttgttttagggttttgattggatatgagatatatgtaggtgatagtggtttggtgtggttaggtgaggatgtgtggtttttttttttttagagttaggtagtggtgggtagttgttggtgatgttttttttgttgtttttatttttagtagaggtaaatgtgggggatgggaaggaattaatttgttttgtgtggtgggtttgataaatattattttattgaattgttataatgttttggagataggttgtttttttttttttttatagatgtaaaaattgaggtttggagagatgtgatttatttaagttttttaggtggaaatggtatgtgaagttatttgattttaatatttgtgtggtttttattatttttagttggttttaagagggtttggtaaggtagaatattgtgaattgagtaagttttaattaggtagttaggaagaagtgaaaagtaaagttggtttgttttttgatgttttgtgtttatgtgagggagttttttatgttttgttattgaagttattttttttgatttttttttagaagaatatggtgtgtttttgttgttggttttaatgtgttggtttgttttgtttgttttaagaagttttaagaagttattgt

SEQ ID NO: 338 - DNA, 2493 bp, Artificial Sequence
  chemically treated genomic DNA (Homo sapiens)
attggtatgattagagtagaaggagggtattttaatttttagttttatttattgttttgtaagaattaggaaaatgaatttttgttggttataaaattagttgtaggtgatgtaatttattttatttggttttttatatttatagttatataggaataattttttgaaatttagtttttttatttgtaaaatgggatggtaatatgtgtttttgggagttagtgagaattaaaagggataagatgtattggtttttaggggtaagtattagtagataaggaatagggtagttttttttttatattttatagagaagaaatgttttttaatttttttaggaggtagagtttagttttttttttaaatagttttggagttgtttggtttttttatttttttaatgaagttgtgggtagaagataaatgtagagtttttttgtatttgataaggagagagaagtagattttgtgtgagttttttgttgttgatgttgatttatagggggtgtaggatgggattgaggtaggtttatttgtttggaaagtttgtttgtattttgattttatggggttttaatatatatttttttagttataggggttttgtagagttaagttagttgttttatggaggtggggattttttttttgttttgttatttttttttttttttggagaggataggtaggtgggtatggttataggagaattttttgaaggtgttaattggtttagagaaagaaaggtggtttggtagggagttgtttattagagattgagagagtatgggagaagttgagagggaggaggaaagtgtatgttattttgtgtgtagttttgttttagggaaagtatgtgtgagaagtggtggtaggtggttgttagttttggaaataaataaatagttaattaaaaggttttggaaggaaggagtgtttaattaattagttttgagggataggtttgtattgtttgattgtgttttttagtttggttttaggttattgagtttaagtttttgttatagttttagggttgaggttgtttttaaagagttttgtaattgttttttatttgtgttttatttaaatattaaggttggtgtaggtggatatttttttatttttttttttttaggttgggttttagaaattagtagaggagggaggaattagttagtgtggttatgtttgggaggagaggtttgtgtgggtttgtggggttaagaggtaaaggtgggtggtggatgtgggttagtgggagtttggaggggttgatattgtttgttttattgtaagtttttggaggaagagttttgttgtgtttgagagtgagtgtgggtaggtgtaattatttggggttggggttttgggggttttgtgtagttttttttttttttagggatattgtttagttgtgttttgtgttttgttgattgtgtgggttttgagatgttggtggttgttttggggttggtttgttttttgtgtatatgtttagggttatttgtgttgtgtttttgttttaggtgtttggttagagaaagggtggtaagatggggtagtgtgtgtgtgtgtgtgggtaagtgtatgtgagtgtatatttatgtgagtgtatgtgtgtttgtgtttgtgtgtgtttaggggaattatagggagtatttttattttaagtttttagaggattgtttgaagttgttagatagaaatttttttagaatgtaagttttgggggggagggagttttgtttgatggttgttgtatttttagtgtttattgaagtattggggatatattagatgtttaataaatagttgttgagttaattaatggattttaggaatggaggtagattggtttttttggaattggagaaaggataaggttatattttattgttttttttgtttttggtattagttttggtgtttttggtaatgttaattttttttatatttagtttgtgttaagtttttttttttgtttgtgtttatatttttttttttttgtttttgttttttgttggtttttgtgtgtaagtattttagtagttagagtgagaggaagatgaaagaagtagaattttggaaatagagagttattagggtggttttttttttttggaaggatatggaaagatggggtgagattggtgtttttttttagtttttttttttgggaattgggattttgagttttagtttttttattttgaaatagtagttattttatttgttttgtaggattgttgtaagaagttaggtaggaggttgaaaagttttggagtatatgataggtgttatagaaatgtttgttttgttttttgattagtatttaatagtttgggagtgttttaggtgtggttgagggtggttatggtttgataattattattagaatattttttttttttttataaaatgttttgaggagaatttaatggttgttgaaaattaaggtaagttttatttttaaaatatttaggagttaat

SEQ ID NO: 339 - DNA, 2493 bp, Artificial Sequence
  chemically treated genomic DNA (Homo sapiens)
attgatttttgaatgttttagaaatgaagtttgttttaatttttgatagttattaaattttttttaaggtattttgtgaaaaaaggaggggtgttttggtggtggttattaaattataattatttttagttatatttggggtatttttagattgttggatgttagttaggagatgaaatgaatgtttttgtagtatttattatgtgttttagaattttttagttttttgtttgattttttgtaataattttgtgaggtaggtggaatagttgttattttaaagtgaggaaattgaagtttaaagttttaatttttaaagggaggagttgaagaagagtgttagttttattttatttttttgtgtttttttagaaggaagaggttattttggtagttttttatttttagaattttgttttttttgttttttttttattttgattgttggggtgtttatatataggggttagtaggaaatagagataaaggggagaaggtgtaaatatgagtagggaggaaaatttggtataagttggatgtgagaaggattggtgttgttggggatgttagggttggtattaagaatagaggagatggtgaaatgtggttttgttttttttttagttttagaagggttggtttgtttttatttttagagtttgttgattaatttaatagttgtttattaagtatttaatgtgtttttagtattttaatgggtattgggaatatagtagttattaaataaagtttttttttttttggagtttatattttaggggagtttttatttagtggttttaggtagttttttggaggtttagaatgagggtgttttttgtggtttttttggatatgtataagtgtagatatatatgtgtttatataagtgtgtatttatatgtatttgtttgtgtgtgtatatgtattgttttgttttgttgttttttttttagttaagtatttgaagtagaggtgtagtgtggatgattttgaatatgtgtgtgaggagtaggttaattttgaggtagttattagtgttttaaggtttgtgtagttggtggggtgtggggtgtagttgggtggtgtttttgggagggaaggaggttgtgtggagtttttggagttttagttttgggtagttatatttgtttgtgtttgtttttgggtatagtggggttttttttttaggggtttgtggtggagtaggtggtgttaatttttttaggtttttgttggtttatatttgttatttgtttttgttttttagttttatagatttatatgggtttttttttttaggtatggttatgttgattgattttttttttttttattgatttttggggtttagtttggagggagaaaagtgggaaggtgtttatttgtgttagttttggtgtttgggtgagatataggtggaaaataattatagggttttttggaaatagttttggttttggaattgtggtagaaatttggatttggtggtttgaaattaggttgaggagtatagttaggtagtgtggatttgttttttggggttgattaattagatattttttttttttgaagttttttggttggttgtttgtttgtttttaaggttagtaattgtttattattattttttatatatgttttttttaaggtgaggttgtgtgtaggatggtgtgtatttttttttttttttttaattttttttatgtttttttaatttttggtagataattttttattaggttatttttttttttttgggttagttagtatttttgagaagtttttttgtggttatgtttatttgtttgttttttttaggagaaagagagagtggtagggtaggaggagggtttttatttttataggatagttggtttagttttgtagagtttttgtggttgggagggtgtgtgttagggttttatggggttagggtataggtaggttttttaggtaggtgggtttgttttagttttattttgtattttttgtggattaatgttaatagtaagagatttatatagggtttgtttttttttttttgttaggtataagagaattttgtatttgttttttgtttataattttgttgaagaagtggagaggttaagtaattttaaggttgtttggaaggagagttgggttttgttttttgggagagttggaggatattttttttttgtggagtgtgaagggaggattgttttattttttgtttgttagtgtttgtttttgggagttagtgtattttattttttttaatttttgttggtttttaggggtatgtattattattttattttatgggtgaggagattgagttttagagagttgtttttgtatagttgtaaatatgggaggttgaataggatgggttatattatttgtaattagttttatggttaataggaatttatttttttggtttttgtaaagtggtggataaggttgggaattaggatgttttttttttattttagttatgttagt

SEQ ID NO: 340 - DNA, 2346 bp, Artificial Sequence; identical to SEQ ID NO: 330
  chemically treated genomic DNA (Homo sapiens)

SEQ ID NO: 341 - DNA, 2346 bp, Artificial Sequence; identical to SEQ ID NO: 331
  chemically treated genomic DNA (Homo sapiens)

SEQ ID NO: 342 - DNA, 2494 bp, Artificial Sequence
  chemically treated genomic DNA (Homo sapiens)
tttttatgaagttataaagttgtaattttgtttttatgtgtagtattataggttttgtttttaaatatttgtaggtgtatttttttgtatttgttaaattaagggttttttttttttgtgttagatttgtttttatgattatgttttttatttgatttatagaaagggttttatgattgttaggttattgttgtttttgtattttattggggagttgaaggttttagtgttgtttgtgatttttttaaggtggttgggaaggttttaattatgtttttttgtaaattagataaggaaggtttggggattttggttgtggaaaggtatagaggaggtgaatgttttggatgtttaagtgatgtatttgtaggtggatttggaaatttgtgtttttgagttggaggtggagtttttagatttagattgattttttagaattgggtggttttgtttgaggtatgaaggttttttaggtttgtttttaaaagttgtgtataatggagatttttggaataggtatatatttttattgtaattagaatgagatgtaatatttaagatgtagggtagggttttggtaaagatatgttgggggaatgtgaaagaaagggttaaaattatgtagttggtttttagagattaaagattatgatttttagtatttaatgtagtgaatttttaggatgttgtatgttgggagttgtagttttttattattgttatttttttgtttttttgttatttgaaagggttttaggggatttgtaattttttttgtgtgttttttttttttgagaagtgttgttatatgagaaagttggttgtgaaagttgtgttggaattatttttaatgaaattttaggtatagatgggaaagggtgaagaatatgttgttatggttattgtttttttggttatggaataaatgttttttaggatttggaagtagttttgttgtgatttttttaaaaggatggatgtgttttttgtttatatttattggatgtttttttttagaggttaaggttgtttaggtaaaggggtggttttatgtgtgaggggtttgtggagttatttgattggagaaaagttgtaaattttgattaattggaaggagttatgttttgggtattggttattgtatttggatagttttgattggtggatttttgttttttttatgaatttttattgggtgttgtgggtgtgtggtgtggtgtgattggtgggtttatgttttttgttttttgtttgtgagaagtgggggtgaaaagtggtttgatttgtttggggtgtagtgggtggattgtgtggttggaggtgtgaggatttgaatttaggggtggaggtggtttttgtgattgaaggggatttgagatttattggttgtatgttatgagggttttgtgggtgttgggtttttgttgtgttttgttgatttttggtgagtgattttggaggagtagatgttttttttttatatatgtggttgttttttgaaggttttgggggtgttgaatgtgggaggggggattttggggtttgtggtgggttaagggatgttattattttttgaaagagggtaagggaattatgtttatttttttttttttttggaaataaaaaaagagagtaatattatttaattgttttatagatttaatagtattttgtttggaggttttagtgattttggggtggggtttttttgaggttttggtttttttgggagttgtgtgagttttttttttttttttgtttggaggatttttttggttattgtaatttttggttattttagtttttttgttttttaattttttagattttgattttttgtaagtttgtgtttttttttagatgttggttttgggagtgtgaggtttggggttagtggaatggtagtgttagtgtgtttgatttagttttgttggagtttggtttttaatatttttttttttttttatgtttttgggtttaattttagttttttttgttagaggttgtataaattttatttgtattttgatttgtgttaatgaaggttgaagttttggtttgattagttgggaggttttggtttggtttgtgtgtaatatgtgtgggtgtagaagaggtttggtattagtttgtttaatgttatttataaatgattggagatatattgtttagaagtggtgattgtttttgtattttaggatttattggagattttagtatttgaatttaaatagatgttttgttttggttttatttttggtatttaaattagggaatgtatttttttatttttattttttttagttattaattgaattttgtaatttttatttttttttatttgattattttttttggagaagtgtgatgttgaagagtttgtttgtgttaaatttttagggttggttagagttgatgatgaagttgatgtggatggtatagtagaagaggatttgggtaaaagtagagaaggattaaggatggatgatgaagt

SEQ ID NO: 343 - DNA, 2494 bp, Artificial Sequence
  chemically treated genomic DNA (Homo sapiens)
attttattatttgtttttgatttttttttatttttatttagatttttttttattgtattatttatattaattttattgttagttttgattgattttgaagatttaatatgggtaaattttttaatattatatttttttaaggaggatgattaaatagggaagggtaggggttgtaaaatttagttggtaattaagggaggtggggatgaaagagtgtattttttggtttaaatattaaaggtaaagttaagatagaatatttatttaagtttagatgttgaggtttttagtagattttgaaatatggaggtagttattatttttaaatagtgtgtttttgattatttataaataatgttaagtagattgatattaggttttttttatatttatatgtgttgtgtgtaggttgagttaaggttttttaattgattaagttaaaattttggtttttgttagtataggttagaatgtaaataggatttatgtaatttttggtgaggggaattgaaattgagtttagaggtatgagaagggggagaaatgttaagaattgaattttagtaaaattgaattaaatatgttgatattgttattttgttggttttaggttttatgtttttgaggttagtatttaagaagggatatgggtttgtgaggagttggagtttggggaattaggggatgggaaagttgggatggttgaaggttgtggtggttgaaaaagttttttgggtggggaggggggaggggtttgtatagtttttgggggagttagagttttagagaggttttattttgaggttgttgagatttttgggtgagatattattagatttgtagggtagttagatgatgttgttttttttttttatttttagaggaagaagagaataaatgtaatttttttgtttttttttgaggaatggtgatgttttttggtttattgtaggttttgggatttttttttttatgtttaatgtttttaggatttttgagaagtggttgtgtgtgtggaggggggatgtttgtttttttagaattatttattgaaggttagtaggatgtagtagaggtttagtatttatagggtttttatggtgtgtggttggtgagttttaagttttttttgattgtaggagttgtttttatttttgggtttggatttttatatttttagttgtgtggtttgtttattatattttaagtaggttgggttgttttttatttttattttttgtgggtgggggatgggaaatatgaatttattaattgtgttgtattatgtatttatggtatttaatgaggatttgtgaggggggtggaagtttattaattggagttgtttaggtgtggtgattgatgtttgaagtgtggttttttttgattggttagggtttgtagtttttttttaattaaatggttttgtgggttttttatatgtgggattgtttttttgtttgggtggttttggtttttaagggaaaatgtttaatgaatgtaagtagagaatatatttatttttttagagaggttgtggtggaattatttttggattttagagagtgtttattttgtgattggggaaatggtagttatggtaatgtgttttttatttttttttatttatgtttggggttttgttggaagtgattttagtatgatttttgtggttagtttttttgtgtggtggtgttttttggaaagaagaaatatatgagagaggttgtaaattttttagaatttttttagatggtgggggggtgggggggtggtggtggtgagaaattatagtttttggtatgtaatgttttaggggtttattgtattgaatgttgggggttgtagtttttggtttttgaggattagttgtgtagttttggtttttttttttatgtttttttagtgtgtttttgttagagttttgttttgtgttttagatgttatattttgttttgattatagtagagatatgtgtttattttaggagtttttattgtatatagtttttagaagtgggtttagaaagtttttatgttttgggtaaggttgtttggttttggggggttggtttgagtttgggggttttgtttttggtttaagagtatgagtttttgaatttgtttataagtgtgttatttgggtatttggagtgtttattttttttgtgtttttttgtggttggaatttttaggttttttttatttggtttatagaagaatgtggttgggatttttttgattattttagggaaattgtgagtagtgttgaggtttttgattttttaataaagtataaaggtggtggtgatttgatggttgtagaattttttttgtgaattaggtggagagtgtggttgtaaaagtgggtttagtatagaaaaggaaaatttttagtttaatgagtgtaggaggatgtatttgtagatatttgaaagtaaaatttgtggtgttgtatatgagaatgggattgtagttttgtaattttatagaaa

SEQ ID NO: 344 - DNA, 2196 bp, Artificial Sequence
  chemically treated genomic DNA (Homo sapiens)
tttttttttttttttttttttttattagttatattggtttatttagaattttataaattaattttgtttatttttaattttttaatattgtttttgagattgttttattagaaaagtttttttttttatttattttgtttaataatttttatttattttaatttttttgtatttattgtttttaggaatttggtatttaggatatttttgtttttatattgtttatgtatgtatattttgtttttaataaaatatttagttgtttaagggtaagggttttatagagttttaatatgttaatggtttggtgttgtttaataatttagattttgatgggttttttttagggaggggagtaaagggtaaattattttaggggttgggagtgtagaagttaaatttttgagattgtgaaaagaagatggtgttgagatgatttagtagtaggtatttaagtaagaaaaatttaaatattgtttttaataatgtttgattaatgttaaatattaagtaagggtttaggtagttttgatagtttgtagtgttttaggataaaattaattttgaggggtgttagtttatgataattttttgttagggttttggatatgttttgtttttttgaaggttaatgggttgtttttgtgtgttgaggttttgttttgtggtttgttgattggttttagttgttttggtgttaagatttaattttatattatgtgtttaggttatgtttatttgttatgtggttttggaaattgtgagtttggggattgttgtgtttattaattggatttagaagggatttttttgtttggttggtttttggtttttttgtttatttttggataaattatggggttttttgtgttgtttatggtgttttttgtttgttttgagtgttttttttttttttggtgtttttttgggttgtttttggtggttttggtgttgttgttgttttttttttttggtaggattttggggtggatttgtgtgtttgtggtgaggttagagttttgtttagttagttgggtaggaggtgtggggtgaagtttattgtatgttgtgtttgtttgggatagagagtgaggttagggttttttgaggggtgttgtgtttagattttgggggtatgtggtgggggatgtgggaattatgtagaagtttgtttggtggtattgtgtgtgtggttgatatttatgtaggatttggttgtgtttttaaaagaagtgtgaattgtgtttttgggattgagtttagttagtaaggggagggtttattgggtgttttaggtgagggtttgttttggagtgtataggtgtgtgggattgttgttagagtttgtgttgtgtttgtggtgagagtttgttttgtgtttttttggtgttttggtgagtagggtgtttattagggtttggatagtatttgtggtaagggttgtagtgtgtttgttgtgttttatgggttgggttggtttgggttgggttgggtgagtaggggtttggttaggtgttgttgggagtgtgttgtgtgtaagtggtttgtgtgtggagtttattgtgggtaagatagtttattgtttgttttgagtggagtgagtgtggattttgtggttagggagggtatgttgagtgagagtaggtttttagtgtttggggttagagaggtggtaagggtgtattatgtttttagtgttttttgtgaatagtgtttgtgttgtttgagattgtattggttttgaattttaagtggttgtttttttggggggtgggtgggttattgagttatttttttgtttttaattaatatagatagtatttgattttattgtttagtggttttttgatattgttttttttttttttattagtttgagttatatttgagagatgtgaagtaatttaaaaaatattggtagttaaatttagtgagaaattagtattttaataaaggaaggtagataatgttaattttgtttttttttatagtttataaattgaagtttaaggtttattttattgttttgtattttattgaatggaattaatatttttaaaaatgtatgttaggttaggtttagttgtttatatttgtgattttagtattttgggaggtttaagttgggtgattgtttaagtttaggagtttaagattagtttggataatatgttaaaattttatgtttataaaaaa

SEQ ID NO: 345 - DNA, 2196 bp, Artificial Sequence
  chemically treated genomic DNA (Homo sapiens)
ttttttgtagatatggggttttgatatgttgtttaggttgattttgaatttttgggtttaagtaattatttaatttgggttttttaaagtgttgggattataggtgtgagtaattgggtttggtttagtatgtatttttaaaaatattgattttatttaatgaaatataaaatagtgggataggttttaagttttagtttatgagttgtaggggaaaataagattaatattatttgtttttttttgttaggatattaattttttattaggtttggttattagtgttttttaggttgttttatattttttaaatatgatttaaattaatgaaaagaaggaaaataatgttaaaaagttattaggtaatggaattagatattgtttatattggttgggaataggaagatgatttgatggtttatttattttttaaaaaagtagttatttaaaatttaagattaatatgattttaggtaatatggatattgtttatagaaggtattaaaagtatggtgtgtttttattatttttttaattttaggtattgagagtttgtttttatttaatatgttttttttagttgtagagtttgtgtttgttttatttaaagtaaatagtgagttgttttgtttatagtgaattttgtatataggttatttgtgtatagtatgtttttagtaatatttggttaggtttttgtttgtttagtttagtttaggttagtttagtttatggggtatagtagatgtattgtaatttttattgtgggtattgtttaagttttaatgaatattttatttattaaggtattaagggaatatagggtaaatttttattatgggtatagtatgggttttagtaataattttatgtatttgtgtattttagagtaagtttttatttggggtgtttagtaagttttttttttgttgattgggtttaattttgaaaatatgatttatgttttttttgggaatgtagttagattttgtgtaaatgttggttgtgtatatgatgttattaaataagtttttgtgtggtttttgtattttttgttatatatttttgggatttgagtatggtattttttggagaattttggttttgttttttattttaagtaggtatgatgtgtagtgagttttgttttgtgttttttgtttgattgattgagtagagttttagttttgttgtggatgtgtgaatttattttggggttttattggagaaggaggatagtagtaatattagggttgttagaagtaatttaggaaagtgttgggaaggaaagggatgtttgagatggatgggaggtgttatgagtggtgtgggagattttgtgatttatttggaggtgagtagagaaattgaaagttagttgagtagggaagttttttttgagtttggttagtggatataataatttttaaatttatagtttttagggttgtatgataggtgggtgtggtttgggtgtgtagtgtgaaattgagttttagtgttggggtggttggggttaattggtgggttgtggggtggggttttggtgtgtaggggtagtttgttggtttttgaggagatagggtgtgtttagagttttggtagggggttattgtgggttagtattttttagggttagttttattttggggtattgtaggttgttaggattgtttgggtttttatttggtatttggtattagttaggtattattgggaataatatttgagttttttttgtttgaatgtttgttattgaattgttttggtgttgttttttttttatagttttaaaggtttggtttttgtatttttagtttttaagataatttgttttttgtttttttttttggagaggatttgttagaatttaaattattaagtaatattaggttgttagtatattgagattttatgggatttttgtttttgagtaattaaatgttttattgaagatgaaatatatatgtatgaataatgtaaggataagggtgttttaagtgttaaatttttggaagtaataaatgtaggaggattgggatgggtagaaattgttaggtgaagtggataagggggagaatttttttggtgaaataattttaggaataatgttggaaaattaagaatgagtaggattgatttgtagggttttgagtaagttagtatgattggtaaaagggggaaaaaaaaagggaa

SEQ ID NO: 346 - DNA, 2355 bp, Artificial Sequence
  chemically treated genomic DNA (Homo sapiens)
gtagaaaatttgggtattagtagtaagatttgggagatatttaattggaaagaaataaaaaattattagttttttgaagttatttttattttgaatgttgtttgttaagagaattatttattaaagtttttttgtagtagtttttataaaagttttattttatttagtaagaaagtgttttgttttaaatttaaataaattttatatagatgaggttttggaaattattagtttgattttttatgaagatagttagaggtggataaattaatagatttgttgaaatatttattttttgtaaataggtttgagaattaattaattagaagtggataaaaagtagggattttagaaagatgatttgatatattttattgattttttttggaatgtgatttttaattttttattaagagtttaaaatggttattagttaggatgggtttgggtgaggaattgaattataatttattttaatttttgatttggttgtttgttgttattaggagaaatggggtagagagggagggtattgtttatggagttttattttgtatgttttgatttttttttggtgtttttttattttgtttttattttgattgtttgtgagggagatgttggttgatggatttgtatttgtttttattttttgttttttttgggtgatttttttatagttttggatttttgagaaaggggaagggagatgtgtgtatatgggggtttttgggattgtggttttgtagttgttgttttggtttttagtgttggttggtgatttgaggtgtggtttgtatttatttgtagttttgttttttggtggtggtaatatttagtgatgtttttgtagtttttgtgggttggtgttagttttattgtttttgtattgtttttaagatgttaatttgttgttattatttaggggtatagggaattgaagtttggtgttgtgtgattgtggagggtggtgtgtgagtgtggttttgagtgtgtgagtgtgtgtgtgtgtgtgtggatgtgtttttttttttgatggtaaagatggtttaggaatttgatatttaagttggaatttttttgaagtgggtgaaggtgagtttgatttttttttttgtttttttattttatagtgttaaagtaattaaaagatttgtttattgaggaaaagttaaagttttgtagtttttggtagtgtttgtggttgttttttgtttttgttggatgtgtgtggtgtgtttagttttttggattgtaagaattaaggtggttttgttgtaattattgtttttattttatttttgatttgtttgtttttaaggttgattaaagatttttttttttgttttatgttgttttttttttttatatatatatatatttatatattttttgtttttttttttttgtttttttttttgttttttggggaaaggtaattggatagaatgatttatttttaggaaagtagttttggttatgtattttttgagttttttggtttttgtaggtattgggtttttaatgtggtggagttgttgggaagtttgggataggaaggaggagaggttttgagtttagttgatgttttttttttagatgtttgtgtttttttgtttaggtgtttttgtttttattgtttgtagataggtttttgttggtgtttttgtggagatttggtgttttttatttgaatttatttagtagtaatttttggttagttttagttttttaattttgttttgaagtgttgtgggtagagttttatgtagtttatttgttgtttttttaggtattgtgggttggaaggaagggaaatttgttgatgtttttttggtagtagtgttttggtattgttattattgaggaggtgtgagttttaatattgaatataagtgagtaggtgttgtttgtgttattttgttaaaggtgggaggggagaaagaaaggagtggggggagggggttgaggaaataaatttagattattggtggagaaagaagttgtttagtaagtaaagttttttttttgtgttttattttagatgttatattgttaaaagatattgatgttaattttttagaaagttgttataaagggtagagtttttgttttattttagaattttattttatttagtttggttgtttagtgagtatagagtgatttggtttttttgtatagtgtagtgagaatgtaggagaataggttttgatattttaggttgagttaagtagtaaaatggaatggtagggttgggtggtgttgttttgttttttttttttaatagttagttttgttagttttagtaattgttgttgagagtaaataatggttttgtagaaaaagaatgag

SEQ ID NO: 347 - DNA, 2355 bp, Artificial Sequence
  chemically treated genomic DNA (Homo sapiens)
tttgttttttttttgtaggattgttgtttgtttttaatggtagttgttggggttaatagaattggttgttgggagagagaggtgaggtaatgttgtttggttttgttattttattttattgtttaatttaatttggagtgttaggatttatttttttgtatttttgttgtattatatgggggagttaagttattttgtatttattggatagttaggttgggtggaatagggttttagagtggagtaggggttttgttttttatggtgattttttaaaagattagtattagtgttttttgatagtatagtatttggggtgggatgtggagaggaggttttgtttgttaaatggtttttttttttgttggtgatttggatttgtttttttggttttttttttttgtttttttttttttttttttttgtttttagtaaagtgatataggtgatatttgtttgtttgtgtttgatgttggaatttgtatttttttggtggtgatggtgttagggtattgttattagggggatattggtgggttttttttttttttagtttatgatgtttagaagggtagtgggtgggttgtgtggggttttgtttgtagtattttgaggtgggattgaggggttgaagttggttaggagttgttgttaagtggatttgagtggaaggtgttaagtttttgtgagggtattagtggggatttatttgtgagtagtgggaataggggtatttggatggaggaatgtgggtgtttggaggggggatattggttgagtttagagtttttttttttttttgttttgagttttttagtaattttgttatgttggagatttggtatttgtgagagttagggaatttgagaagtgtgtggttgaggttgtttttttgaaggtgaattattttgtttaattgtttttttttagagaataagagggagggtgggagagagggaatggaggatgtgtgagtgtgtgtgtgtgtgagagggagagatgatgtgaggtgagaggaaaagtttttagttggttttaaaagtaaataaattagagatggaataagagtggtaattgtagtaagattgttttgatttttgtagtttagggagttgagtgtattgtgtgtatttggtgaggataggaggtgattgtgggtgttgttaagggttgtgggattttggtttttttttagtaaataaattttttgattattttgatattgtggaataaagaagtggggagaaggattaggtttatttttatttgttttagggggattttagtttggatgttagatttttgaattgtttttgttattggaggaggaaatatatttatatatgtgtgtgtatatttgtatgtttagggttatatttatatgttgttttttatgattatatagtattagattttggttttttatgtttttggatggtgatggtggattggtattttggaagtgatgtgagagtgataaggttggtgttggtttgtaaaagttgtaggagtattgttaggtgttgttgttattgggaagtggggttgtaggtaggtgtgagttgtgttttgggttgttggttagtgttggggattggagtggtaattgtaggattgtggttttggaagtttttgtgtgtatatgttttttttttttttttttgggggtttgggattgtagagggattgtttggggaaggtgagaggtgagggtagatgtgggtttattggttggtgttttttttgtgggtggttagggtaggggtggagtagagggatgttgagaggggattggagtatgtgaaatgaggttttgtgagtggtgttttttttttttgttttattttttttaataatagtaaatgattaggttgaggattgaagtgggttgtaatttgattttttatttagatttattttggttggtaattattttggatttttaataaggagttgggggttgtattttagggaagattaatgggatgtgttaggttatttttttgaaatttttattttttgtttatttttgattagttaatttttaggtttgtttgtagaaggtgggtgttttagtgagtttattgatttatttatttttaattatttttataaagaattaagttgataatttttggagttttatttatgtaaggtttatttagatttgggatggggtgtttttttattgaatgaaataaagtttttgtaaaggttattataagagagttttagtaaatgatttttttaatgaatagtgtttagaataagaatggttttgggaaattaatggttttttatttttttttggttagatgttttttggattttgttattagtatttgggttttttgt

SEQ ID NO: 348 - DNA, 2192 bp, Artificial Sequence
  chemically treated genomic DNA (Homo sapiens)
ttatataatttttaaaaagaaagaaatttttaaattatagatgtgtttggaattagaatttagaaagtatttgggtagggaaaatagtttttagtgtttaaggttaaagttagtagggtttttttggatgggaaagagatatgagattgtaagtaatttttggatattatttatttgttattgtgtttttatttttttttttagttatttatatgttttttttttttagttaaaatgaatttaatttttgttatagtattttattttgttaataaaatttaggattgaagaatgagaataaaagggttttatatttattattttttaatttttgattttagtttggatagaataattatttattttagaaaattggtatagggagtatttattagtagttgtaatatattattgttaaagggagggattttgtaaggtggtattgggtgttttatatgtatgggaaatttgaggttatgtttagtgttaattataagtatttttatttttggttaggtaagttttgatttttgaattttgagtttttaattttttttaaaatgagaaagagatggttttttttagagttttttagtttttaatttataggtaaatattattgtatgttgttttttagtagagattggttttaattaaggtaaataagttaggatggattttgttgattgtgatggtttagtgttatattttatatattttattattttttagaatatttaatagtgttgtttttggtagttttggggttgtagtttttgtagagaggaggaattggtattgaaagaaatagttgagttttattatgttatgtggggtgtttttattgttaagagtaattttttttttttgggaagaaaagtgtgggtggggttggggtagttttttttttttgtgttgttttggagattatgggtgtttagttgtagttgttgttggattggttttggttgttttgagaggtgttttttgtaggtggggatgtggttaggttggatgtaaggtttttttttaatttattgggtttagggggatggttaggggttgtttagtttatttggtgggttagggagggggatggtagaggttggttgggtttttttagtatatagtaggtgtttaattagtgtgatttgaattaggttattttttttttttaatttttttttttgtgttttatggagggtggattagggttttggatgtgaattttgtgttgtattagagttttagttttaattgatattttgagtgttgttaatttttttttgaagagtatggtagagtgaagtataagtaataattttgtattatttgtgtttttagagtttttttggatttgtgttatgtgtggtggggagaattggttttttgtttgagtttagagtttatttgaggttagttttattgttttgttgaaagttaaaattttaagttgatgttttttagttgtttattttttagtagagagtttttttttggggagttttgttttggggtgttgttttgaggttagatgttgttttgtttggatttgaatttgagtttgggatgggtgattttttaattttaggaattggaattgagatattaaagtttagatgtgttttttggatgatggttttttggtaggggtatttagttagtggttaagatgttgttagtggggaaggtgatttaggttttgaatgggaaagtttattagtagattttttaggttgaggtaggagttgttttttgttttgtttttttttatttttttttttttgtttttttttaaattttttttttttttagggtttttttattggaaattgaataaaataagggttttgaaattattttgattttaaaaataatttttgtttgtttttaaattgtattaatataaaattagaatgttagtttttgaaaattagaaaatttaaattaaaattttaaatgtaaattatttagaaatagtttggatggaattattgggtgatttttgttttttttatgtataaaaatatgattaatttttgtatttaaaaaataggttttattttgtattagtgttttgaaatttgttttttttttataatagtattttatagatttttttttatgtttgtgggtgtttatgtattttattatattgagtagttttttatttgttgatttaggatttttat

SEQ ID NO: 349 - DNA, 2192 bp, Artificial Sequence
  chemically treated genomic DNA (Homo sapiens)
atgggagttttaggttaataagtggggagttgtttagtatggtgaaatatatgggtgtttatgggtatagaaaagggtttgtgagatattgttatgaagaaaaagtagattttaaaatattagtatagaatgaaatttattttttaaatataaaaattagttatgtttttatgtatgggaaaaatagaggttatttagtggttttatttaggttatttttgagtaatttatatttaaaattttaatttaagttttttaatttttaagaattgatattttaattttgtattggtatgatttaagaataagtaagaattatttttaaaattaaagtaattttaaagtttttgttttatttaatttttagtagggaagttttgggagggagggaagtttggaagaaagtaagggaagggggatggagaaaagtgggatagagggtggtttttattttagtttggaagatttgttggtaggtttttttatttggaatttgggttattttttttattgatgatattttggttgttggttggatgtttttgttgggaagttgttgtttaggaaatgtgtttaggttttggtgttttaattttaatttttgaggttgggaaattgtttgttttaaatttaggtttaggtttaggtgggatgatgtttggttttgaggtggtattttagggtaggattttttggggaaggattttttgttggggggtaggtggttggggaatgttgatttagggttttaatttttaatgaaatgatgaaattaattttagatgagttttgaatttgagtaggaggttggttttttttgttgtgtatggtgtaaatttgaagggattttgggaatgtgaataatataggattattgtttgtgttttattttgttatgttttttggggaaaagttaatggtgtttaaggtgttggttgggattggaattttaatgtggtgtagaatttgtatttgggattttaatttattttttatgggatatagggaggagaattggagggagagagtaatttgatttaggttatgttaattaggtgtttattgtgtgttgagaagatttaattagtttttgttatttttttttttagtttgttaagtagattgagtagtttttggttgtttttttgagtttggtagattggagggaggttttgtgtttggtttggttgtgtttttgtttgtagaaagtattttttaaggtagttagggttggtttagtgataattgtagttggatgtttatggtttttaaggtaatgtggaggggagggattgttttggttttgtttatgtttttttttttagggaggggagattgtttttagtaatgggagtgttttatgtggtgtagtgaaatttaattattttttttaatgttagttttttttttttataaggattataattttagggttgttaggagtagtattattaaatgttttgaaaggtggtaggatatatgagatgtagtattgagttattatggttaataaagtttattttaatttatttgttttggttaaaattaatttttgttgggggatagtatatggtagtgtttgtttgtaagttagaagttgaaagattttggaagaaattattttttttttattttaaaagaggttgagagtttaaaatttagggattaaggtttgtttggttagagatgaaaatgtttgtggttggtattgaatgtggttttgggttttttatatatatgagatatttagtgttgttttatagaatttttttttttggtagtgatatgttataattgttaataaatgttttttatgttaattttttagaatgagtgattgttttgtttagattagaattagaaattaagaaatggtgagtataaaatttttttatttttattttttagttttgggttttattaataaggtgaagtattgtaataaagattagatttattttagttggaaaaagaaaatgtgtaggtgattgagggaagggatgaaaatataataataaataggtaatgtttaggaattatttgtagttttatattttttttttatttaaggaggttttattggttttggttttgaatattagaaattattttttttatttagatgttttttgggttttggttttaggtatatttgtaatttaggggtttttttttttttaaaaattatatgg

SEQ ID NO: 350 - DNA, 2315 bp, Artificial Sequence
  chemically treated genomic DNA (Homo sapiens)
ttgtatttggtgtgaggttttttggttatggatgttgttggtgttatatttgtggtatttgaggtgaattgtttagatggaaatggtattattaggtaattggtaatagaagtttaaagttttgggtgttttaggttagaggaaggaaggaatgtaagggttttgttttttttaatgttaggagtgtgtgtttatagttttagataggataatttattgtaaatttaaagtagaaaatatggtttaattttatttttgtggtatttttatagatggtgtttatttgttttggtagtgatgattgatattgtgaatgttgtgttggtagtgtgtttaagggttttaattgaattattttgatggagttgaaatttagttttattttatagaagagaaaattgaggtttagagagattaggtgttaagttttatgttaagtatagggaagtaaaaataggatatatttaatataaggtggttttaggaattagtggttaggatatgggaggtgtgttgagtgtagatgggtagatgtaagttgaggtggtttgttggagggttttggattttttagaaaagaggatattagttgtttagggagggaaggtttgagatggattttggttggtgtggattagtttatggtgtgtttgtaggtagggatattttgaatagatatgggttgaggggagtttgtgtggagtgtggttagtgaaggttgggttggttggtagggtttgttggttatgggaggtttggtttgtagtagtagggtttattaaagatatggggatggatggttgatggataagatggttgatggatagtgttttagaaggttgtaggtttgtttaggttgaggttagggagggttagggtttttagggaaggagagtaagttaggggagttttttgtatagaagattttttatttgaggttgttttttaggagtttagttattttgtggagagtttggtgttgattgtggaagaggtgatggatgtgtgttgtgtgttggtgaaggttgagatggaaaagtttttgtagaataaggagttttttagtagtttgaagaaggggaaggtgaggttgtttagatgtggggttatgtttttgtttgttgggttaggggtgggtgttgagagggttagtttttaggattgtttgtttatgatttggttgggagttttgagggggtagtagggatagggtgggattttagggagttttggataaagtggggttttaattagttttttttgatagatttgttgttgttgttgggttaagtttttgttgtttttgtggttgtttagttgttttttttgtaagaggtgagttttttttttagttgttagtttataagggaaggaggaggtgagaaattttggggtagtattgtttatagaattttttgtgattttaggaatgttttagtatgtttgatggttgatgagtttataagatatggttagtatgaatgaggagttaaattttaaattgtatttaaattaaattaaatttaaatagttaagtaatttttagttttagttaagatggggtaataggtattttttatagttaagaataaataggatgtgaaataatggtttttaagatagtaggtaataaaaaggaaatataatggggtaagtttgttattattatagttattgtttggagagtttttaggttatgagttatagttgttggattttttagatggaggaggttaggttgagaatttagggagattatagtagtttgagtttgttgtgtagaattttagaggagagggttgtgttgagaaagttttagagaaggtttttttttttgaaggaaatgattgaaggttgtagaatatttattttaaagtagagattggtagattatagttatgggttaaatttggtttttggtttgttttgtaagtaaaattttattggatatagttatatttatttattatttgtttagttatgtttaaaaggtttattttttggttttttatataaaaaatttatttttttttgttttaaagatttgaagggatggtgtttaggggtaggaatgagtaatattggtttttattggttataggtagaaatgttataatttatagggtattaattggaatgtatataaaggatttgttttattaatgtggagtaagtagtttaaagtgattgttgttttaggtttgattgatatattataaaagtaagatttgaaaggattaaattgtttataagtattttaattgattttgagaataaagtttaagaataagaattttttaaatattaataaaaaa

SEQ ID NO: 351 - DNA, 2315 bp, Artificial Sequence
  chemically treated genomic DNA (Homo sapiens)
ttttttgttgatgtttaaaaaatttttatttttgagttttgtttttagaattagttaagatatttgtgaatagtttgatttttttaggttttgtttttatgatgtattagttaggtttagagtaataattattttgggttatttattttatgttagtgaggtgagttttttgtgtgtattttagttagtgttttgtgaattatgatatttttgtttgtggttggtggaaattgatgttatttatttttgtttttgagtattgtttttttagatttttagaataagggaaggtaaattttttgtgtaaagggttagagaataaattttttaggtgtggttgagtgagtaataaatgggtgtggttgtgtttagtgagattttatttgtaaaataggttgaggattagatttggtttgtggttatagtttgttaatttttgttttaggataaatgttttgtagtttttagttattttttttagagagggggattttttttgaggtttttttggtgtagtttttttttttggagttttatatggtggatttgagttgttgtggtttttttggatttttagtttgattttttttatttggggagtttggtagttgtggtttatgatttagaaattttttaggtaatgattgtggtgatggtaggtttgttttgttgtgttttttttttgttgtttgttgttttgaaaattattgttttatattttgtttgtttttggttgtggaagatgtttattattttattttggttgaaattgggagttgtttagttatttaaatttaatttaatttaaatataatttaaaatttaattttttatttgtattaattatattttgtggatttattagttattgaatatgttagaatatttttggaattataggaagttttgtgggtggtattgttttgaggttttttgtttttttttttttttgtgaattgatagttaaagggaaggtttattttttgtagaagagatagttgggtggttatgagaatagtgggaatttggtttggtagtagtagtaaatttgttaggagagattggttagagttttgttttgtttaaagttttttggggttttgttttgtttttgttatttttttagggtttttaattagattatgagtaaatagttttgggaattggtttttttggtatttgtttttgatttagtgggtaagagtgtagttttatgtttaggtagttttattttttttttttttagattgttgaagagttttttgttttgtaaaaatttttttattttggtttttattagtatatggtgtatgtttattattttttttatagttagtgttaggttttttatggggtggttgaatttttaggggatggttttaggtaggaagttttttatgtaggaggtttttttagtttattttttttttttgaggattttaattttttttggttttagtttaaataagtttgtgattttttaaaatgttgtttattagttattttgtttattagttatttatttttatgtttttgatgggttttgttgttgtaggttaggttttttatgattagtggattttgttggttagtttagtttttattggttatgttttatataaattttttttagtttatgtttgtttaaggtgtttttgtttgtaaatatattatgggttgatttatattagttagaatttattttaaattttttttttttgagtagttgatgtttttttttttggaaggtttaggattttttaataggttattttagtttgtatttgtttatttgtgtttagtatattttttgtgttttggttattgatttttggggttattttatgttgagtgtgttttgtttttgtttttttgtgtttggtatagaatttgatatttgatttttttaagttttagtttttttttttgtaaaatggggttggattttagttttattgagatgatttagttaaagtttttaaatatattgttagtatagtgtttgtagtgttggttattattgttaaggtaggtgggtattatttatgaaggtgttatagagatggagttggattatgttttttgttttggatttgtagtgggttgttttgtttaaagttgtgaatatatgtttttggtattggggggagtggggtttttgtatttttttttttttttgatttgaggtatttagggttttaggtttttgttgttagttgtttgatggtgttgtttttatttgaataatttattttaggtgttataggtgtgatgttaataatgtttgtggttaggagattttatgttaggtatag

SEQ ID NO: 352 - DNA, 3404 bp, Artificial Sequence
  chemically treated genomic DNA (Homo sapiens)
ggtttgagaatgtttaattggaagttgtttttaagtgatttgtgtgttttttttttgtttggtttgttttttggttaaatttttaaaagagtgtgtatttttttttgtttggagtagagtgttgatttttttttgtgtttgtggaggtgtagttttttggtttatttggatgttgggggttaggtttaggattttagggttttgtgttttggagttttgtgggttaataggtgatgggagaggggttagattgggggtgtgttttgatagatttaggtaatgattgtgtgggtaaaggttggtgttttggggttggggtggggttgttggaggggtggggtgggggttgttagatgggtgtgttagttgtgttaagtatttattatgtttttgttagatttgggtattttagggagttggtggtgtttttgtttgagaaggagttgggaagaggagagtggtttttgggaagaggagagtggtttttgggaagtattttttttgaggaagaggtggtggtggtggtggtatttatggagagaaaaagtaagtagttgtattttgtttttaagtgttagattttgatatgtgttttttgtagtgatgataattgattaatttgagagaatgtgtataaggaaagtgagggaagggggttttttatttttttttagttatttttaaatgttttaggaggtttggtatttgttttaagtggtttttagtgttagtttttgggtattgtgggttgttttggggtttgtgaatttttagaatgttagtttttggttgttgttgtgttttagaggtgttgttgtttagaagttgggtgtatttgttgtttgttagttatagattattatttttttttttattatttttgtgttttttatatattatatttttgtatttaaagaatttaggtttttagaattagaattttttttatgtagtttgtatttagaagagtaaagagaattagatattttggttgtaggaatttttttttttagtgatgtagttatttatagtttaaattttagtttgagtttgtgtgtgtttgtgtgtggggttttgttgtggtggtgtaaattttttttttggtttgttattttagaggaattatagtatgttagggttgaaggtttttgattgttaatgttaggggagtagaaatgtggttttggaggggatgagtgtgtgtttttagtagatgtttgtttttttgtaaatgtgtaattgttagtttggaggtatggggttttttgaatgggtttagtatttatataggttgtagatgtggaaagtggggttagaaggttaggttgaaagaaggattagaatttggtgttgggtttgaggggggtttgagtgaattaagaggagtgtatgatgagaataaagaaaaggtgtattaagtttttagaaatagatgaattaaggatttatatgtaagtttttttaatattttgtttgataattattatgatttaaattttataatagatttttttttttttatatattaggaataagtaattattttttttttgtttttaatagattgaaaaatgaaatttagatatatagtttgaaagattaggggggtgatgggatgaggggggttggggatgggattgtgatattgtttaaaagtaagagatttttattgatagggtttatttttttttagttttaattataggtattgaaaggtattttattttttgttaaaggtttaaagaaggaaaatataattatatataggtgtatttgtaatagtttgttaaataaaatttgtttttttttattagaattaatttttagggtttaggtttttggtaaggattgggtatttggattttttaattgttgtattatggggtaaataattggggattttgagttgtttaggtggtatttttataaattgtatagttttagtttgttttttgtttttatggtttgattaagtttgttgggttgttgttgtttttatgattgttgggtttgatgtgtagtgtgtgttgaatggagatatttttggtttttgggttgtgtgttgtatgttgtgttttatttttgtggtgttattgttttgtgttggtggttgagtgttaattgtaggattgtgttgttgtttttgatgtagtgagtattttattagtaatttgagttttttgagtttattgaagttttggtttttttgggaaggttttgggtttttgttatttgttggtgggttggtggagatggtaggggttgtattttttagtttttaatttaattttggttgtagtttttatagaaggtgaataaggagataaggaagattgagttagagagagatgtgatttgtttgaggtattaagaaataagtttgttggtagtttttttaattttattttatttttgttgttgtttatgttttttagattgtttgtgttagaaattttgtatttgttggatggatggttttgggtatagggttgtaggtggtttggaatagttttggtttgtgtttgttggtttgttaggagtggttttagtggtgagggggtggggagttggtgggggagggttgtttggtgttggaggtgtggttggtagtgttgtggatgagttggtttgtgtaggtagatatttaaataaataagttagaataaattttgtttttttattattttatttttttttgtagtttgtgttttttttgtgtgtgtaaagtggagtagttagatgtagtataaaataatttatgaagggtattgagtttgaaaaattatggtgtatgagtaggttttattttaggttttagttattttgagttgtggatttttaaatgttgtttgttttgaagtagtttttgttttattgtgttttttgtattgatttttttttttggtttttgattggttgttttatgtttagttttttttaattttttttttatttttgtttgtttgtattgtgtttgttgtttgtaagtttttgattgtagattggttgtttgttttatattttaataatattaattagggggggagggggtggggttttgagttgagagtttttgttatttgggttgagtggtaggtatagttggtttgttaggaggtgatttttagggttaaggggtgggttttggtgaaatggttgttttggttatgggggtggggtttgaggtaggagttaattggtgttgagtggagttaggttgttggtttaggattttttttaggttttgagtttgtgttggatgtttagaggagaatgaggatggtagttgaggtgtgtgttgttttggatgttttgtttttagtaattgtagtttttgtgtagtagaataaatttgagaataatgtttttaatttatatttttttttatagttgtattttgtgtg

SEQ ID NO: 353 - DNA, 3404 bp, Artificial Sequence
  chemically treated genomic DNA (Homo sapiens)
tgtgtggagtatagttatagaaaagagtgtaagttgggagtgttatttttggatttattttgttatgtgaaagttgtggttgttaaaagtagagtgtttaaagtagtatatattttggttattatttttgtttttttttgaatatttagtgtgagtttagaatttggagggaattttggattagtaatttgattttgtttggtattgattggtttttgttttggattttgtttttgtggttggggtggttattttgttgggatttgttttttggttttgggaattgttttttggtaggttggttgtgtttgttatttagtttgagtggtggaggtttttagtttggagttttgttttttttttttttaattgatattattggagtgtggagtaagtggttggtttgtagttggagatttgtaggtagtaaatatggtgtgagtgaataggagtgggggggaaattaaaaaaagttaaatgtggagtagttgattggggattgagaaggggaattgatgtaaggagtataataaaataaaagttattttggaataaatagtatttaaaaatttatgatttaagataattgaaatttaaaataaaatttgtttatgtattatggttttttaaatttggtattttttatggattattttatgttatatttggttgttttgttttgtatatataggggaggtgtaggttgtgaaggaaggtaaggtgatgggaaagtaaagtttgttttgatttatttatttagatgtttatttgtataagttagtttgtttgtggtgttgttggttgtgtttttggtgttgggtgatttttttttgttggttttttgtttttttattgttgaggttgtttttggtggattagtgagtgtgaattagggttgttttgagttgtttatagttttgtgtttggagttgtttatttgatgggtgtgggatttttggtgtgggtagtttggagggtgtgagtagtaatgggggtggggtggggttggaggaattgttggtgagtttattttttagtattttaggtgggttatatttttttttagtttggttttttttgtttttttatttgttttttgtgggagttgtggttagagttgggttggagattgggaaatgtagtttttattgtttttgttagtttgttggtgagtggtgggagtttggagtttttttagagggattgagattttgatgagtttggaaagtttgggttattaatgaagtgtttattgtgttggaggtggtggtgtggttttgtggttggtgtttggttgttagtatggaataataatgttgtggaggtgaagtgtggtgtgtggtgtgtgatttgagggttggggatgtttttatttagtgtgtgttgtgtgttgggtttagtggttatgggggtagtggtagtttagtgggtttggttgggttgtggaggtagggggtgggttggagttgtgtaatttgtaaggatgttgtttgggtgatttaaagtttttaattatttgttttatagtgtagtaattgaggaatttgagtgtttaatttttgttaaagatttgaattttgagggttggttttggtaggagaaggtaggttttatttggtaagttgttatagatatgtttgtatatggttatgttttttttttttgaatttttgatagaaggtaaaatattttttggtgtttgtagttggagttggggaaaaataaattttgttaatggaagttttttgtttttgagtagtgttataattttatttttaattttttttattttgttgtttttttggttttttaggttgtgtatttaagttttattttttgatttgttaaaagtagaagagaaataattatttatttttgatgtgtagagggagaggaatttgttatgaaatttaggttatggtggttattgggtggggtgttgaggggatttatatataggtttttgatttatttatttttgaaaatttagtgtattttttttttatttttattgtgtattttttttagtttgtttaagttttttttaaatttggtgttaaattttagttttttttttagtttgattttttgattttattttttatatttgtaatttgtatagatgttgaatttatttagagaattttgtgtttttaagttggtggttatgtgtttgtagaaggatggatatttgttagaaatgtatgtttattttttttaaaattatatttttatttttttgatgttagtgattagaaatttttagttttggtatattgtgatttttttggaatagtggattagaggaaaagtttgtattgttgtggtgaaattttgtgtgtgaatatatgtagatttgggttggagtttgggttataaataattgtattattagggggagaggtttttgtagttagaatgtttagttttttttgtttttttgggtgtaagttatgtgaagaggattttgattttaagagtttgaattttttagatgtagaagtgtgatgtataaaaggtgtgggggtgatgggagggagggtggtgatttgtggttggtgggtggtgagtgtgtttggtttttaggtggtgatgtttttagggtgtagtggtgattaagagttggtgttttaggagtttataagttttgaggtggtttgtagtatttaagggttagtgttgggaattgtttgaagtaggtgttgggttttttggggtatttgggggtggttagaggaagataagaaattttttttttttattttttttgtgtatgtttttttgggttggttagttattattgttatagggagtgtgtgttagagtttgatgtttgaaggtaaagtgtagttgtttattttttttttttgtaaatgttgttgttgttgttgttttttttttagaggagatgttttttgaaagttatttttttttttttgaaagttatttttttttttttgatttttttttgagtgagggtgttattggttttttggagtgtttaggtttggtagaggtgtaatggatgtttggtgtggttggtgtgtttgtttggtagtttttgttttgtttttttgatggttttgttttagttttgggatgttagtttttgtttgtgtggttgttgtttgggtttgttagggtgtgtttttagtttagttttttttttattatttgttggtttataggattttggggtgtggagttttggagttttaggtttggtttttagtgtttgggtgagttgagggattgtgtttttgtgggtgtaaagggaggttggtattttgttttgagtgggaagggatatgtgtttttttgagggtttaattagagagtggattgagtagaagagagatgtatggattatttgagagtggtttttgattaaatgtttttgggtt

SEQ ID NO: 354 - DNA, 2304 bp, Artificial Sequence
  chemically treated genomic DNA (Homo sapiens)
tgatttttttgttttagttttttgagtagttagaattataggtgtgagatatgtatttagttaattttttgtgttttttagtagaaatggggttttattatgttggttatgttggttttgaatttttgattttaagtgatttatttatttttgttttttaaagtgttgggattttaggagtgattttgtatgtttagttattaataaatatttattaagtgtttattttgtttttaagagtgttgggaatttagtagtgaataaaataaatatttttttttggggattttgaatttaagtttagttagggattattttattaagagattaagttaatatttaatttttttatagatttagataggatagtattttaattttttgttgatttgtttttttagattttagattatgggtattgtagatttttgtattttttgtagaggtagggttttattattattagagattttattattatttttatgtgaagggaaatagtgtttttttagtagataatgttaaattagttattagatgtgggttatggtgggtttgttgtgattgttataaatatgttttattgaagtttgttaggggatgttatatttttttttagaaagtaagaaatagagaaaggtttttttttgttttggattgttttttttttagttttaagaaatttttttatagttgttattttattttggtttgttttttgagtaagaaaattgttggaaagagtttgttatttatttagattataattagggagtttgttgttatttaggaagggttttaaaaaatttttttgatttattgtgagtgtaaatttttgatatttttgtatttttttatttattttattttgattttatatatagtgtgattttgaaaggaagtggtgtttttggagaggtagaaaaattttggaaaataaggtttatgatgttggttattagtatggggttgttgtttgttgtgtgatatgtttaggggtgatgtgttttttgaaagagatatttggtagagaaggtatgggtgtgaagtttggttgtgggagagttgggagtttgaatgttgttggttgttgtttatagtaggttttttttgagtattgtggggaggtagtgatatttgttggttttgtagtgatattttggtagttgttttgttttttagtttggatgtgataggtgtgttttggaggatagttagaggaagataggtaagttatattggttttttttgaggttatatttttgtttaggttaggttgtttttaatagatattttttgtgggtgttgaggtagttagttttattgttatttagataattttttttttgttttgttaattttgttttttttttaagaatgtttaaattttttatttaagtgatgagagggaaatatttgagttgtatatttaaggagatgtgggtttttattttggttttgtgatatattattggtgggattgtgggtgagttatttaatttttttagtttttagtttttttatttgtaaagtgggttttagtatatggtttaattgaggtaatatatgttgtttatgttagttgttgtttttatgttggttttgtttaggtttttttatggtaataggataggagttttttgtttgtgtgttagttttttattagtgtgggaatgttgtgaggagggggtggaatttggtgtagtaagggtttttgtttgtattttttattttttttttttttttttttttgagattgagttttgttttgttgtttaggttggagtgtagtggtgtgatttttgtttattgtaagttttgtttttagggtttatgttatttttttgttttagttttttaagtagttgggattataggtgtttgttattaagtttagttaattttttgtatttttagtagagatggggttttattgttttagttgggatggttttgattttttgattttgtgatttgtttgttttggttttttaaagtgttgggattataggtgtgattattgtgtttggtttgtattttttattaagaattagtaattatgggttgggtgtggtggtttatgtttgtaattttagtatttagggaggttaaagtgggtggattatgaggttaggtgatttagattattttggataatatggtgaaattttgtttttattaaaaatataaaaaatttggtaggtgtggtggtgggtgtttgtagttttagttatttgggaggttgagggaggagaatggtgtgaatttgggaggtggagtttgtagtgagttgagatggtatta

SEQ ID NO: 355 - DNA, 2304 bp, Artificial Sequence
  chemically treated genomic DNA (Homo sapiens)
tggtgttattttggtttattgtaagttttgttttttaggtttatgttattttttttttttagttttttgagtagttgggattataggtgtttgttattatgtttgttaaattttttgtatttttagtagagatggggttttattgtgttatttaggatggtttggattgtttgattttgtgatttgtttattttggtttttttaagtgttgggattataggtgtgagttattatgtttagtttgtggttgttggtttttaatagaagatatgggttgggtgtggtagttatgtttgtaattttagtattttgggaggttgaggtgggtggattatgaggttaggagattgagattattttggttaaaatggtgaaattttgtttttattaaaaatataaaaaattagttgggtttggtggtgggtgtttgtagttttagttatttgggaggttgaggtaggagaatggtgtgaattttggaagtggagtttgtagtgagtggagattgtgttattgtattttagtttgagtgatagagtaagatttagttttaaaaaaaaaaaaaaaaaaaaaatagaagatatggatagaaatttttgttatattgagttttgttttttttttatagtatttttatgttagtgaaaaattgatgtataggtagagaatttttattttgttgttatggggagatttaggtagagttggtatgaaagtaatagttgatatgaataatgtgtgttattttagttaagttgtatgttggagtttattttatagataagaaaattgaggattagagaagttaagtgatttatttatggttttattaataatatattgtaaggttagaatggaaatttatatttttttgagtgtgtagtttaagtgttttttttttattgtttgaatgaagagtttaaatatttttgaaaggggaatagggttggtagagtgagagaaaaattgtttgggtgatagtgaagttggttgttttaatgtttgtggaggatgtttgttagaagtaatttaatttaagtgagggtataattttgagggaggttagtatggtttgtttgtttttttttgattgttttttaagatatatttattatgtttaggttggaaaataggatagttgttggagtgttgttgtgaggttagtgggtgttattgtttttttatggtgtttagagagagtttgttgtgaatggtagttagtgatatttaggtttttagtttttttgtagttgggttttgtgtttgtgttttttttattaagtgttttttttgggaggtgtgttatttttgagtatgttatatagtagatagtagttttgtgttgatggttaatgttataagttttattttttagagtttttttatttttttaaaaatattgtttttttttaaaattgtattatgtgtaaaattaaaataagatggatggggagatgtaggaatattagagatttgtatttatagtaaattagaagaattttttaaagttttttttgagtgatagtaggttttttgattatgatttgagtgaatggtagattttttttagtagtttttttatttaagagataggttaggataaagtaatagttgtaaagaaattttttagagttgagagaaagatagtttggggtaggagaaagtttttttttgttttttattttttaggggagggtatggtgttttttggtagattttggtgaggtgtgtttgtggtagttatggtaaatttattatgatttatgtttgatggttgatttaatgttgtttattgaaagggtattgtttttttttatatagaaatgatggtaaagtttttggtagtggtgaaattttgtttttataaaaggtgtaaaaatttgtagtgtttatggtttagggtttgagggagtagattaatgagaaattaaaatattattttatttgagtttgtaggagaattgagtgttgatttgattttttaatagagtgatttttgattagatttgagtttaaggtttttgagggaaggtatttattttgtttattgttaagtttttagtatttttgggaataaagtaggtatttagtaagtatttattgatggttgggtatgtgggattatttttgaaattttaatattttgggaggtgaaggtgggtggattatttgaggttaggagtttgaggttagtgtggttaatatggtgaaattttgtttttattaaaagatataaaaaattagttgggtgtatattttatatttgtaattttagttatttgggaggttgaggtaagagaattg

SEQ ID NO: 356 - DNA, 10 bp, Homo Sapiens
gggccgcggc

SEQ ID NO: 357 - DNA, 10 bp, Homo Sapiens
ccccgcgggg

SEQ ID NO: 358 - DNA, 10 bp, Homo Sapiens
cgcgggggcg

SEQ ID NO: 359 - DNA, 10 bp, Homo Sapiens
gcgcgccgcg

SEQ ID NO: 360 - DNA, 10 bp, Homo Sapiens
gcggggcggc

SEQ ID NO: 361 - DNA, 10 bp, Homo Sapiens
gcgccgacgt

SEQ ID NO: 362 - DNA, 10 bp, Homo Sapiens
cgggacgcga

SEQ ID NO: 363 - DNA, 10 bp, Homo Sapiens
ccgcgatcgc

SEQ ID NO: 364 - DNA, 10 bp, Homo Sapiens
tggccgccga

SEQ ID NO: 365 - DNA, 10 bp, Homo Sapiens
tgcgacgccg

SEQ ID NO: 366 - DNA, 10 bp, Homo Sapiens
atcccgcccg

SEQ ID NO: 367 - DNA, 10 bp, Homo Sapiens
gcgcatgcgg

SEQ ID NO: 368 - DNA, 10 bp, Homo Sapiens
gcgacgtgcg

SEQ ID NO: 369 - DNA, 10 bp, Homo Sapiens
  unsure (7, 9): unknown base
gccgcgngng

SEQ ID NO: 370 - DNA, 10 bp, Homo Sapiens
  unsure (8, 9): unknown base
gcccgcgnng

SEQ ID NO: 371 - DNA, 10 bp, Homo Sapiens
agcggccgcg

SEQ ID NO: 372 - DNA, 10 bp, Homo Sapiens
ctcccacgcg

SEQ ID NO: 373 - DNA, 10 bp, Homo Sapiens
gaggtgcgcg

SEQ ID NO: 374 - DNA, 10 bp, Homo Sapiens
aggggacgcg

SEQ ID NO: 375 - DNA, 10 bp, Homo Sapiens
gagaggcgcg

SEQ ID NO: 376 - DNA, 10 bp, Homo Sapiens
gcccccgcga

SEQ ID NO: 377 - DNA, 10 bp, Homo Sapiens
cggggcgcga

SEQ ID NO: 378 - DNA, 10 bp, Homo Sapiens
ggggacgcga

SEQ ID NO: 379 - DNA, 10 bp, Homo Sapiens
accccacccg

SEQ ID NO: 380 - DNA, 24 bp, Homo Sapiens
agcactctccagcctctcaccgac

SEQ ID NO: 381 - DNA, 12 bp, Homo Sapiens
ccgggtcggtga

SEQ ID NO: 382 - DNA, 24 bp, Homo Sapiens
accgacgtcgactatccatgaacc

SEQ ID NO: 383 - DNA, 12 bp, Homo Sapiens
ccggggttcatg

SEQ ID NO: 384 - DNA, 24 bp, Homo Sapiens
aggcaactgtgctatccgagtgac

SEQ ID NO: 385 - DNA, 12 bp, Homo Sapiens
ccgggtcactcg
